United States Patent Application Publication US 2026/0216245 A1 - sequence listing, part 3

SEQ ID NO: 60716 - DNA, 20 bp, synthetic construct
  source 1..20: mol_type = other DNA
ctgagctcaggcaggcctgc

SEQ ID NO: 60717 - DNA, 20 bp, synthetic construct
  source 1..20: mol_type = other DNA
ggtacaataagagtatcagc

SEQ ID NO: 60718 - DNA, 20 bp, synthetic construct
  source 1..20: mol_type = other DNA
gtagatgttggacttgatca

SEQ ID NO: 60719 - DNA, 20 bp, synthetic construct
  source 1..20: mol_type = other DNA
caagatcgacggggaactca

SEQ ID NO: 60720 - DNA, 20 bp, synthetic construct
  source 1..20: mol_type = other DNA
ctggaactggcagagcgggt

SEQ ID NO: 60721 - DNA, 20 bp, synthetic construct
  source 1..20: mol_type = other DNA
gaagcaggtcaggcaagctg

SEQ ID NO: 60722 - DNA, 20 bp, synthetic construct
  source 1..20: mol_type = other DNA
atgcgctacgcacagctcag

SEQ ID NO: 60723 - DNA, 20 bp, synthetic construct
  source 1..20: mol_type = other DNA
gtagtgcgtgatgaggtcat

SEQ ID NO: 60724 - DNA, 20 bp, synthetic construct
  source 1..20: mol_type = other DNA
cagaaagtaattacccttgt

SEQ ID NO: 60725 - DNA, 20 bp, synthetic construct
  source 1..20: mol_type = other DNA
agtcaggtcccggccagcca

SEQ ID NO: 60726 - DNA, 20 bp, synthetic construct
  source 1..20: mol_type = other DNA
ggaggtgaggaggccacagg

SEQ ID NO: 60727 - DNA, 20 bp, synthetic construct
  source 1..20: mol_type = other DNA
tacgacaaggagcagctcaa

SEQ ID NO: 60728 - DNA, 20 bp, synthetic construct
  source 1..20: mol_type = other DNA
cactgaaaacttcccacatc

SEQ ID NO: 60729 - DNA, 20 bp, synthetic construct
  source 1..20: mol_type = other DNA
agggatagcacagcctggat

SEQ ID NO: 60730 - DNA, 20 bp, synthetic construct
  source 1..20: mol_type = other DNA
gcctcacctggaactggcag

SEQ ID NO: 60731 - DNA, 20 bp, synthetic construct
  source 1..20: mol_type = other DNA
tgtatgagggacgcaaccct

SEQ ID NO: 60732 - DNA, 20 bp, synthetic construct
  source 1..20: mol_type = other DNA
cccggcagtcctttcctaca

SEQ ID NO: 60733 - DNA, 20 bp, synthetic construct
  source 1..20: mol_type = other DNA
gttgaggtgctcctgtgggg

SEQ ID NO: 60734 - DNA, 20 bp, synthetic construct
  source 1..20: mol_type = other DNA
ctggaggaacacttccgaga

SEQ ID NO: 60735 - DNA, 20 bp, synthetic construct
  source 1..20: mol_type = other DNA
caggacgttgcgggccgcca

SEQ ID NO: 60736 - DNA, 20 bp, synthetic construct
  source 1..20: mol_type = other DNA
ggcagtgagaatgacaccat

SEQ ID NO: 60737 - DNA, 20 bp, synthetic construct
  source 1..20: mol_type = other DNA
ctcctcaaaggagaacatct

SEQ ID NO: 60738 - DNA, 20 bp, synthetic construct
  source 1..20: mol_type = other DNA
cacgagaaccagcgactctt

SEQ ID NO: 60739 - DNA, 20 bp, synthetic construct
  source 1..20: mol_type = other DNA
ggggatgaagtacctggagg

SEQ ID NO: 60740 - DNA, 20 bp, synthetic construct
  source 1..20: mol_type = other DNA
cccaaagtcagacaccttga

SEQ ID NO: 60741 - DNA, 20 bp, synthetic construct
  source 1..20: mol_type = other DNA
gggaaaagtgattcgagggg

SEQ ID NO: 60742 - DNA, 20 bp, synthetic construct
  source 1..20: mol_type = other DNA
ccacaggacgtccatgagct

SEQ ID NO: 60743 - DNA, 20 bp, synthetic construct
  source 1..20: mol_type = other DNA
gtcgcagtgtctcgttgtct

SEQ ID NO: 60744 - DNA, 20 bp, synthetic construct
  source 1..20: mol_type = other DNA
gagatgcagcagcggttgca

SEQ ID NO: 60745 - DNA, 20 bp, synthetic construct
  source 1..20: mol_type = other DNA
attctggatgatggcgctct

SEQ ID NO: 60746 - DNA, 20 bp, synthetic construct
  source 1..20: mol_type = other DNA
ggtgggcaccgtcatgactt

SEQ ID NO: 60747 - DNA, 20 bp, synthetic construct
  source 1..20: mol_type = other DNA
agccatagggggtcatccta

SEQ ID NO: 60748 - DNA, 20 bp, synthetic construct
  source 1..20: mol_type = other DNA
ttgatataggtgccttatgt

SEQ ID NO: 60749 - DNA, 20 bp, synthetic construct
  source 1..20: mol_type = other DNA
tacaaggagaggtgagaccc

SEQ ID NO: 60750 - DNA, 20 bp, synthetic construct
  source 1..20: mol_type = other DNA
cgatgggaaagtggtggaag

SEQ ID NO: 60751 - DNA, 20 bp, synthetic construct
  source 1..20: mol_type = other DNA
aggtacagctgaacaactgc

SEQ ID NO: 60752 - DNA, 20 bp, synthetic construct
  source 1..20: mol_type = other DNA
ggagatgtaagtgatcaacc

SEQ ID NO: 60753 - DNA, 20 bp, synthetic construct
  source 1..20: mol_type = other DNA
tggatgttggcgatggtgtc

SEQ ID NO: 60754 - DNA, 20 bp, synthetic construct
  source 1..20: mol_type = other DNA
aattgaagagctccaggaac

SEQ ID NO: 60755 - DNA, 20 bp, synthetic construct
  source 1..20: mol_type = other DNA
cggccaggagcacagcaggt

SEQ ID NO: 60756 - DNA, 20 bp, synthetic construct
  source 1..20: mol_type = other DNA
cctgcagcgtgtagtcttcc

SEQ ID NO: 60757 - DNA, 20 bp, synthetic construct
  source 1..20: mol_type = other DNA
ggaggaagagaagcccgtgg

SEQ ID NO: 60758 - DNA, 20 bp, synthetic construct
  source 1..20: mol_type = other DNA
cccttggagagaaaccagga

SEQ ID NO: 60759 - DNA, 20 bp, synthetic construct
  source 1..20: mol_type = other DNA
cggcctcacctggaactggc

SEQ ID NO: 60760 - DNA, 20 bp, synthetic construct
  source 1..20: mol_type = other DNA
caaagaggtggaggaagaga

SEQ ID NO: 60761 - DNA, 20 bp, synthetic construct
  source 1..20: mol_type = other DNA
gccaggagcacagcaggtag

SEQ ID NO: 60762 - DNA, 20 bp, synthetic construct
  source 1..20: mol_type = other DNA
cccaccttcatccgctcgtc

SEQ ID NO: 60763 - DNA, 20 bp, synthetic construct
  source 1..20: mol_type = other DNA
ctggaattccatgggctcac

SEQ ID NO: 60764 - DNA, 20 bp, synthetic construct
  source 1..20: mol_type = other DNA
ctcgcatgaccttgaagtgt

SEQ ID NO: 60765 - DNA, 20 bp, synthetic construct
  source 1..20: mol_type = other DNA
acagttcgggtggacactct

SEQ ID NO: 60766 - DNA, 20 bp, synthetic construct
  source 1..20: mol_type = other DNA
aggacagccaaggggcacga

SEQ ID NO: 60767 - DNA, 20 bp, synthetic construct
  source 1..20: mol_type = other DNA
gaagatctcatccccaccga

SEQ ID NO: 60768 - DNA, 20 bp, synthetic construct
  source 1..20: mol_type = other DNA
tagcaagctatagcaagcca

SEQ ID NO: 60769 - DNA, 20 bp, synthetic construct
  source 1..20: mol_type = other DNA
acacaatggccacttgtcgg

SEQ ID NO: 60770 - DNA, 20 bp, synthetic construct
  source 1..20: mol_type = other DNA
cccacgcacactcaatgcag

SEQ ID NO: 60771 - DNA, 20 bp, synthetic construct
  source 1..20: mol_type = other DNA
agttaatgggtgaaaaaggt

SEQ ID NO: 60772 - DNA, 20 bp, synthetic construct
  source 1..20: mol_type = other DNA
cttggagaggcgccgcagct

SEQ ID NO: 60773 - DNA, 20 bp, synthetic construct
  source 1..20: mol_type = other DNA
ggagctgtaccaactcatga

SEQ ID NO: 60774 - DNA, 20 bp, synthetic construct
  source 1..20: mol_type = other DNA
gcctttaccgcgctggacgt

SEQ ID NO: 60775 - DNA, 20 bp, synthetic construct
  source 1..20: mol_type = other DNA
ccgctcaagtggtacgcacc

SEQ ID NO: 60776 - DNA, 20 bp, synthetic construct
  source 1..20: mol_type = other DNA
ctggcccacaacgtgtccaa

SEQ ID NO: 60777 - DNA, 20 bp, synthetic construct
  source 1..20: mol_type = other DNA
ggcgcaggacgggcaggaag

SEQ ID NO: 60778 - DNA, 20 bp, synthetic construct
  source 1..20: mol_type = other DNA
cacaaaggactggatagtgc

SEQ ID NO: 60779 - DNA, 20 bp, synthetic construct
  source 1..20: mol_type = other DNA
gataaccaggttgtctgtaa

SEQ ID NO: 60780 - DNA, 20 bp, synthetic construct
  source 1..20: mol_type = other DNA
ggaccactgcagcattgccc

SEQ ID NO: 60781 - DNA, 20 bp, synthetic construct
  source 1..20: mol_type = other DNA
cacaggtgggaggatcgccc

SEQ ID NO: 60782 - DNA, 20 bp, synthetic construct
  source 1..20: mol_type = other DNA
cgcaggtagggcgtgagctt

SEQ ID NO: 60783 - DNA, 20 bp, synthetic construct
  source 1..20: mol_type = other DNA
gacttgaagcaatcctttag

SEQ ID NO: 60784 - DNA, 20 bp, synthetic construct
  source 1..20: mol_type = other DNA
ccttctatcagggctaccgc

SEQ ID NO: 60785 - DNA, 20 bp, synthetic construct
  source 1..20: mol_type = other DNA
ttccacctggagcaggagaa

SEQ ID NO: 60786 - DNA, 20 bp, synthetic construct
  source 1..20: mol_type = other DNA
gcagcagtctggagaaggct

SEQ ID NO: 60787 - DNA, 20 bp, synthetic construct
  source 1..20: mol_type = other DNA
agccaaggacctgaagaaca

SEQ ID NO: 60788 - DNA, 20 bp, synthetic construct
  source 1..20: mol_type = other DNA
tacaggatcgaccgagccca

SEQ ID NO: 60789 - DNA, 20 bp, synthetic construct
  source 1..20: mol_type = other DNA
agaagaccacatagcccctt

SEQ ID NO: 60790 - DNA, 20 bp, synthetic construct
  source 1..20: mol_type = other DNA
gctggacaacccctacatcg

SEQ ID NO: 60791 - DNA, 20 bp, synthetic construct
  source 1..20: mol_type = other DNA
aggatgactgggtacctgcg

SEQ ID NO: 60792 - DNA, 20 bp, synthetic construct
  source 1..20: mol_type = other DNA
aggagtaaaaactcatccac

SEQ ID NO: 60793 - DNA, 20 bp, synthetic construct
  source 1..20: mol_type = other DNA
tgatcttggtggtaagggtg

SEQ ID NO: 60794 - DNA, 20 bp, synthetic construct
  source 1..20: mol_type = other DNA
aggggccaagtttcccatta

SEQ ID NO: 60795 - DNA, 20 bp, synthetic construct
  source 1..20: mol_type = other DNA
aggtgcaggagttcatgctc

SEQ ID NO: 60796 - DNA, 20 bp, synthetic construct
  source 1..20: mol_type = other DNA
gccgcagtactcgcacgtgt

SEQ ID NO: 60797 - DNA, 20 bp, synthetic construct
  source 1..20: mol_type = other DNA
ctggaaccagcgttcggccc

SEQ ID NO: 60798 - DNA, 20 bp, synthetic construct
  source 1..20: mol_type = other DNA
ggacaggatgactgggtacc

SEQ ID NO: 60799 - DNA, 20 bp, synthetic construct
  source 1..20: mol_type = other DNA
gttgagtccattgtccactg

SEQ ID NO: 60800 - DNA, 20 bp, synthetic construct
  source 1..20: mol_type = other DNA
atgggaaacttggcccctaa

SEQ ID NO: 60801 - DNA, 20 bp, synthetic construct
  source 1..20: mol_type = other DNA
gctcgcatgcgctgctccac

SEQ ID NO: 60802 - DNA, 20 bp, synthetic construct
  source 1..20: mol_type = other DNA
ctttcccaggctcctacgac

SEQ ID NO: 60803 - DNA, 20 bp, synthetic construct
  source 1..20: mol_type = other DNA
tccatcgtcagacgctacaa

SEQ ID NO: 60804 - DNA, 20 bp, synthetic construct
  source 1..20: mol_type = other DNA
tcctatcaaaagggcaacct

SEQ ID NO: 60805 - DNA, 20 bp, synthetic construct
  source 1..20: mol_type = other DNA
aggaggaatgtaagctggag

SEQ ID NO: 60806 - DNA, 20 bp, synthetic construct
  source 1..20: mol_type = other DNA
ggccttacaagtgcgagctg

SEQ ID NO: 60807 - DNA, 20 bp, synthetic construct
  source 1..20: mol_type = other DNA
ggaggagaagtacactgaca

SEQ ID NO: 60808 - DNA, 20 bp, synthetic construct
  source 1..20: mol_type = other DNA
taaagatgatctcaatgtct

SEQ ID NO: 60809 - DNA, 20 bp, synthetic construct
  source 1..20: mol_type = other DNA
tttgaaggtaggtgacctgg

SEQ ID NO: 60810 - DNA, 20 bp, synthetic construct
  source 1..20: mol_type = other DNA
agcaaactgcccgtaggtga

SEQ ID NO: 60811 - DNA, 20 bp, synthetic construct
  source 1..20: mol_type = other DNA
tatagagcacaaaaggaagc

SEQ ID NO: 60812 - DNA, 20 bp, synthetic construct
  source 1..20: mol_type = other DNA
tcacttacatctccagcgaa

SEQ ID NO: 60813 - DNA, 20 bp, synthetic construct
  source 1..20: mol_type = other DNA
gccctgatagaaggtacctc

SEQ ID NO: 60814 - DNA, 20 bp, synthetic construct
  source 1..20: mol_type = other DNA
agcgacaacatcatgatccg

SEQ ID NO: 60815 - DNA, 20 bp, synthetic construct
  source 1..20: mol_type = other DNA
cagatttgcaacttggattc

SEQ ID NO: 60816 - DNA, 20 bp, synthetic construct
  source 1..20: mol_type = other DNA
cgagaaccagcgactctttg

SEQ ID NO: 60817 - DNA, 20 bp, synthetic construct
  source 1..20: mol_type = other DNA
tccaggtatgccttcctgct

SEQ ID NO: 60818 - DNA, 20 bp, synthetic construct
  source 1..20: mol_type = other DNA
ctggcgcactgagccaaagt

SEQ ID NO: 60819 - DNA, 20 bp, synthetic construct
  source 1..20: mol_type = other DNA
ggagatccagcagacggagg

SEQ ID NO: 60820 - DNA, 20 bp, synthetic construct
  source 1..20: mol_type = other DNA
cacaaagttcttctcctcca

SEQ ID NO: 60821 - DNA, 20 bp, synthetic construct
  source 1..20: mol_type = other DNA
gtcctccagggcctccttgc

SEQ ID NO: 60822 - DNA, 20 bp, synthetic construct
  source 1..20: mol_type = other DNA
agctccatctcagcctgcat

SEQ ID NO: 60823 - DNA, 20 bp, synthetic construct
  source 1..20: mol_type = other DNA
agctcaccggaggagtggat

SEQ ID NO: 60824 - DNA, 20 bp, synthetic construct
  source 1..20: mol_type = other DNA
gtgtagatgacctgtgacgg

SEQ ID NO: 60825 - DNA, 20 bp, synthetic construct
  source 1..20: mol_type = other DNA
ctgaaagagaaaacctctgg

SEQ ID NO: 60826 - DNA, 20 bp, synthetic construct
  source 1..20: mol_type = other DNA
tgcctctacatagaagccag

SEQ ID NO: 60827 - DNA, 20 bp, synthetic construct
  source 1..20: mol_type = other DNA
gtcaaggacaagatcggcga

SEQ ID NO: 60828 - DNA, 20 bp, synthetic construct
  source 1..20: mol_type = other DNA
ccacatgaagacgcacgggc

SEQ ID NO: 60829 - DNA, 20 bp, synthetic construct
  source 1..20: mol_type = other DNA
tcatccccatggacacctgg

SEQ ID NO: 60830 - DNA, 20 bp, synthetic construct
  source 1..20: mol_type = other DNA
cagagcagacagggtgtaga

SEQ ID NO: 60831 - DNA, 20 bp, synthetic construct
  source 1..20: mol_type = other DNA
ccagccgctccaccagcttc

SEQ ID NO: 60832 - DNA, 20 bp, synthetic construct
  source 1..20: mol_type = other DNA
tcagggtggtgcttcctgac

SEQ ID NO: 60833 - DNA, 20 bp, synthetic construct
  source 1..20: mol_type = other DNA
gaagagcgggacagctacaa

SEQ ID NO: 60834 - DNA, 20 bp, synthetic construct
  source 1..20: mol_type = other DNA
gggtcaccttgcagtgggga

SEQ ID NO: 60835 - DNA, 20 bp, synthetic construct
  source 1..20: mol_type = other DNA
gagaagctgaagaacttcag

SEQ ID NO: 60836 - DNA, 20 bp, synthetic construct
  source 1..20: mol_type = other DNA
acaacatcatgatccgagag

SEQ ID NO: 60837 - DNA, 20 bp, synthetic construct
  source 1..20: mol_type = other DNA
gaggaacacttccgagatga

SEQ ID NO: 60838 - DNA, 20 bp, synthetic construct
  source 1..20: mol_type = other DNA
acagccacatctgaggatga

SEQ ID NO: 60839 - DNA, 20 bp, synthetic construct
  source 1..20: mol_type = other DNA
gctgaagggcatctggcaga

SEQ ID NO: 60840 - DNA, 20 bp, synthetic construct
  source 1..20: mol_type = other DNA
cagtgtacttctcctccgtc

SEQ ID NO: 60841 - DNA, 20 bp, synthetic construct
  source 1..20: mol_type = other DNA
ggaggaggaatgtaagctgg

SEQ ID NO: 60842 - DNA, 20 bp, synthetic construct
  source 1..20: mol_type = other DNA
acacgtaccctccctggctg

SEQ ID NO: 60843 - DNA, 20 bp, synthetic construct
  source 1..20: mol_type = other DNA
tccatctcagcctgcatgga

SEQ ID NO: 60844 - DNA, 20 bp, synthetic construct
  source 1..20: mol_type = other DNA
ccaagctcacgccctacctg

SEQ ID NO: 60845 - DNA, 20 bp, synthetic construct
  source 1..20: mol_type = other DNA
caacagtgaaaccactttga

SEQ ID NO: 60846 - DNA, 20 bp, synthetic construct
  source 1..20: mol_type = other DNA
agggatgaccaacccggagg

SEQ ID NO: 60847 - DNA, 20 bp, synthetic construct
  source 1..20: mol_type = other DNA
ctgacacactgtagggaaaa

SEQ ID NO: 60848 - DNA, 20 bp, synthetic construct
  source 1..20: mol_type = other DNA
ccagagctggaccctgagag

SEQ ID NO: 60849 - DNA, 20 bp, synthetic construct
  source 1..20: mol_type = other DNA
caggaaatcactcaattctg

SEQ ID NO: 60850 - DNA, 20 bp, synthetic construct
  source 1..20: mol_type = other DNA
tgtgccaggtgctgccagac

SEQ ID NO: 60851 - DNA, 20 bp, synthetic construct
  source 1..20: mol_type = other DNA
cttctgaggaactcatctct

SEQ ID NO: 60852 - DNA, 20 bp, synthetic construct
  source 1..20: mol_type = other DNA
gcagtctggagaaggctggc

SEQ ID NO: 60853 - DNA, 20 bp, synthetic construct
  source 1..20: mol_type = other DNA
gtccaggatggccttgtctg

SEQ ID NO: 60854 - DNA, 20 bp, synthetic construct
  source 1..20: mol_type = other DNA
ttgaagggctgcttgcatgt

SEQ ID NO: 60855 - DNA, 20 bp, synthetic construct
  source 1..20: mol_type = other DNA
ggacctgctgatggtgccta

SEQ ID NO: 60856 - DNA, 20 bp, synthetic construct
  source 1..20: mol_type = other DNA
caggaacttgtgcagcggcc

SEQ ID NO: 60857 - DNA, 20 bp, synthetic construct
  source 1..20: mol_type = other DNA
aggaggctgaagtaatgatg

SEQ ID NO: 60858 - DNA, 20 bp, synthetic construct
  source 1..20: mol_type = other DNA
cagcctcatgtacagcgccc

SEQ ID NO: 60859 - DNA, 20 bp, synthetic construct
  source 1..20: mol_type = other DNA
ctttcaggtggtacaataag

SEQ ID NO: 60860 - DNA, 20 bp, synthetic construct
  source 1..20: mol_type = other DNA
gcaccaggtgtccatgggga

SEQ ID NO: 60861 - DNA, 20 bp, synthetic construct
  source 1..20: mol_type = other DNA
gtgaccagggagatgcgcac

SEQ ID NO: 60862 - DNA, 20 bp, synthetic construct
  source 1..20: mol_type = other DNA
gagtaaacctgaagctgctg

SEQ ID NO: 60863 - DNA, 20 bp, synthetic construct
  source 1..20: mol_type = other DNA
cttgtaggtgtgctgatgtg

SEQ ID NO: 60864 - DNA, 20 bp, synthetic construct
  source 1..20: mol_type = other DNA
ctttaaagtccgcttctttg

SEQ ID NO: 60865 - DNA, 20 bp, synthetic construct
  source 1..20: mol_type = other DNA
ctcaatggaccccttcagcg

SEQ ID NO: 60866 - DNA, 20 bp, synthetic construct
  source 1..20: mol_type = other DNA
cgtagttggaggaatccagt

SEQ ID NO: 60867 - DNA, 20 bp, synthetic construct
  source 1..20: mol_type = other DNA
tccagatacctggtggaaat

SEQ ID NO: 60868 - DNA, 20 bp, synthetic construct
  source 1..20: mol_type = other DNA
caatagccagcacaggagag

SEQ ID NO: 60869 - DNA, 20 bp, synthetic construct
  source 1..20: mol_type = other DNA
gtagtgcagggcctcatagt

SEQ ID NO: 60870 - DNA, 20 bp, synthetic construct
  source 1..20: mol_type = other DNA
gctctcacttgaatccactg

SEQ ID NO: 60871 - DNA, 20 bp, synthetic construct
  source 1..20: mol_type = other DNA
ccttgatggccacgtcgatc

SEQ ID NO: 60872 - DNA, 20 bp, synthetic construct
  source 1..20: mol_type = other DNA
cccggatgaggaaggagccg

SEQ ID NO: 60873 - DNA, 20 bp, synthetic construct
  source 1..20: mol_type = other DNA
ctccagttcgtcagcaggtc

SEQ ID NO: 60874 - DNA, 20 bp, synthetic construct
  source 1..20: mol_type = other DNA
cgacaacatcatgatccgag

SEQ ID NO: 60875 - DNA, 20 bp, synthetic construct
  source 1..20: mol_type = other DNA
ctgagaagctgaagaacttc

SEQ ID NO: 60876 - DNA, 20 bp, synthetic construct
  source 1..20: mol_type = other DNA
tgacctgctcacctgtggcc

SEQ ID NO: 60877 - DNA, 20 bp, synthetic construct
  source 1..20: mol_type = other DNA
ataggaaatatgaattaccg

SEQ ID NO: 60878 - DNA, 20 bp, synthetic construct
  source 1..20: mol_type = other DNA
tagtcaggctcctggaaaca

SEQ ID NO: 60879 - DNA, 20 bp, synthetic construct
  source 1..20: mol_type = other DNA
tccacaggcccgggcctcca

SEQ ID NO: 60880 - DNA, 20 bp, synthetic construct
  source 1..20: mol_type = other DNA
atcagtacaccagttccaca

SEQ ID NO: 60881 - DNA, 20 bp, synthetic construct
  source 1..20: mol_type = other DNA
ggtgatatttgagaactcgc

SEQ ID NO: 60882 - DNA, 20 bp, synthetic construct
  source 1..20: mol_type = other DNA
aggaaatatgaattaccggg

SEQ ID NO: 60883 - DNA, 20 bp, synthetic construct
  source 1..20: mol_type = other DNA
ccagctgccgcaacctggcc

SEQ ID NO: 60884 - DNA, 20 bp, synthetic construct
  source 1..20: mol_type = other DNA
gggagatgcgcactgtccct

SEQ ID NO: 60885 - DNA, 20 bp, synthetic construct
  source 1..20: mol_type = other DNA
atactccaccagctgcaggg

SEQ ID NO: 60886 - DNA, 20 bp, synthetic construct
  source 1..20: mol_type = other DNA
gttgttcatgatccagttct

SEQ ID NO: 60887 - DNA, 20 bp, synthetic construct
  source 1..20: mol_type = other DNA
gtcaccaagtggaacaagca

SEQ ID NO: 60888 - DNA, 20 bp, synthetic construct
  source 1..20: mol_type = other DNA
gacacctggtgcagcagctc

SEQ ID NO: 60889 - DNA, 20 bp, synthetic construct
  source 1..20: mol_type = other DNA
aggttgcacagtcacagaat

SEQ ID NO: 60890 - DNA, 20 bp, synthetic construct
  source 1..20: mol_type = other DNA
gaggaggagagtgtaggtga

SEQ ID NO: 60891 - DNA, 20 bp, synthetic construct
  source 1..20: mol_type = other DNA
catcaagaaatcccaacaaa

SEQ ID NO: 60892 - DNA, 20 bp, synthetic construct
  source 1..20: mol_type = other DNA
agcagtaaacagggctgcta

SEQ ID NO: 60893 - DNA, 20 bp, synthetic construct
  source 1..20: mol_type = other DNA
cccggtagttgacctgggac

SEQ ID NO: 60894 - DNA, 20 bp, synthetic construct
  source 1..20: mol_type = other DNA
cacatggataatggttccat

SEQ ID NO: 60895 - DNA, 20 bp, synthetic construct
  source 1..20: mol_type = other DNA
gcgcagggccatggctgagg

SEQ ID NO: 60896 - DNA, 20 bp, synthetic construct
  source 1..20: mol_type = other DNA
ccacatgggcaaaggatcgt

SEQ ID NO: 60897 - DNA, 20 bp, synthetic construct
  source 1..20: mol_type = other DNA
gactatgaggccctgcacta

SEQ ID NO: 60898 - DNA, 20 bp, synthetic construct
  source 1..20: mol_type = other DNA
gtccaaagacaacaggcagt

SEQ ID NO: 60899 - DNA, 20 bp, synthetic construct
  source 1..20: mol_type = other DNA
ttgtagggcttctggccgta

SEQ ID NO: 60900 - DNA, 20 bp, synthetic construct
  source 1..20: mol_type = other DNA
tctactccaagaagtcgcag

SEQ ID NO: 60901 - DNA, 20 bp, synthetic construct
  source 1..20: mol_type = other DNA
gctgcatggagacacgcaca

SEQ ID NO: 60902 - DNA, 20 bp, synthetic construct
  source 1..20: mol_type = other DNA
cgatcttgggccggccatag

SEQ ID NO: 60903 - DNA, 20 bp, synthetic construct
  source 1..20: mol_type = other DNA
gatccagtagtgggaaagag

SEQ ID NO: 60904 - DNA, 20 bp, synthetic construct
  source 1..20: mol_type = other DNA
gggtggagggtatgttctgc

SEQ ID NO: 60905 - DNA, 20 bp, synthetic construct
  source 1..20: mol_type = other DNA
ccacacatctgacttgatgg

SEQ ID NO: 60906 - DNA, 20 bp, synthetic construct
  source 1..20: mol_type = other DNA
tcagcacacctacaagaaat

SEQ ID NO: 60907 - DNA, 20 bp, synthetic construct
  source 1..20: mol_type = other DNA
tctggaagttgagggccaca

SEQ ID NO: 60908 - DNA, 20 bp, synthetic construct
  source 1..20: mol_type = other DNA
tgggccagccagttcacttt

SEQ ID NO: 60909 - DNA, 20 bp, synthetic construct
  source 1..20: mol_type = other DNA
tcccagtcaccagtttgtac

SEQ ID NO: 60910 - DNA, 20 bp, synthetic construct
  source 1..20: mol_type = other DNA
gttgcacagtcacagaattg

SEQ ID NO: 60911 - DNA, 20 bp, synthetic construct
  source 1..20: mol_type = other DNA
ggtggagtagacaagctgtg

SEQ ID NO: 60912 - DNA, 20 bp, synthetic construct
  source 1..20: mol_type = other DNA
agtagacaagctgtgagtac

SEQ ID NO: 60913 - DNA, 20 bp, synthetic construct
  source 1..20: mol_type = other DNA
tgctatagcttgctagtaac

SEQ ID NO: 60914 - DNA, 20 bp, synthetic construct
  source 1..20: mol_type = other DNA
ggggtggagtagacaagctg

SEQ ID NO: 60915 - DNA, 20 bp, synthetic construct
  source 1..20: mol_type = other DNA
gacgagtgggaggttcccag

SEQ ID NO: 60916 - DNA, 20 bp, synthetic construct
  source 1..20: mol_type = other DNA
ccatgccctcacacacatcc

SEQ ID NO: 60917 - DNA, 20 bp, synthetic construct
  source 1..20: mol_type = other DNA
ctcccaccttgcaggctcag

SEQ ID NO: 60918 - DNA, 20 bp, synthetic construct
  source 1..20: mol_type = other DNA
gtcgatcttgggccggccat

SEQ ID NO: 60919 - DNA, 20 bp, synthetic construct
  source 1..20: mol_type = other DNA
tccagtacctgccagataca

SEQ ID NO: 60920 - DNA, 20 bp, synthetic construct
  source 1..20: mol_type = other DNA
agtaccgctcctggaaggtt

SEQ ID NO: 60921 - DNA, 20 bp, synthetic construct
  source 1..20: mol_type = other DNA
cacaaagaagcggactttaa

SEQ ID NO: 60922 - DNA, 20 bp, synthetic construct
  source 1..20: mol_type = other DNA
ctttcccagggtcgagcact

SEQ ID NO: 60923 - DNA, 20 bp, synthetic construct
  source 1..20: mol_type = other DNA
cctggaggatgacgagctgg

SEQ ID NO: 60924 - DNA, 20 bp, synthetic construct
  source 1..20: mol_type = other DNA
gcagagctcagcctcataga

SEQ ID NO: 60925 - DNA, 20 bp, synthetic construct
  source 1..20: mol_type = other DNA
gtggatggccatgctgaggg

SEQ ID NO: 60926 - DNA, 20 bp, synthetic construct
  source 1..20: mol_type = other DNA
acggcagtgctggactttcc

SEQ ID NO: 60927 - DNA, 20 bp, synthetic construct
  source 1..20: mol_type = other DNA
gacatctgccaaagaatggc

SEQ ID NO: 60928 - DNA, 20 bp, synthetic construct
  source 1..20: mol_type = other DNA
agcttcaatgttggcagggg

SEQ ID NO: 60929 - DNA, 20 bp, synthetic construct
  source 1..20: mol_type = other DNA
aggagcaggctcctgcacag

SEQ ID NO: 60930 - DNA, 20 bp, synthetic construct
  source 1..20: mol_type = other DNA
agtagtttatctgagaagag

SEQ ID NO: 60931 - DNA, 20 bp, synthetic construct
  source 1..20: mol_type = other DNA
atgggggatgtgcaggaccg

SEQ ID NO: 60932 - DNA, 20 bp, synthetic construct
  source 1..20: mol_type = other DNA
tttacagacaacctggttat

SEQ ID NO: 60933 - DNA, 20 bp, synthetic construct
  source 1..20: mol_type = other DNA
gtggcgcaggagcggcgagt

SEQ ID NO: 60934 - DNA, 20 bp, synthetic construct
  source 1..20: mol_type = other DNA
gaaaaaggtactcagcagca

SEQ ID NO: 60935 - DNA, 20 bp, synthetic construct
  source 1..20: mol_type = other DNA
cccgtaggtgatgtccccgc

SEQ ID NO: 60936 - DNA, 20 bp, synthetic construct
  source 1..20: mol_type = other DNA
aaagagaaaacctctgggga

SEQ ID NO: 60937 - DNA, 20 bp, synthetic construct
  source 1..20: mol_type = other DNA
cgcgcgagtagaactcgcag

SEQ ID NO: 60938 - DNA, 20 bp, synthetic construct
  source 1..20: mol_type = other DNA
tggagtccatgaaggtgcac

SEQ ID NO: 60939 - DNA, 20 bp, synthetic construct
  source 1..20: mol_type = other DNA
gttggcgatggtgtctgaac

SEQ ID NO: 60940 - DNA, 20 bp, synthetic construct
  source 1..20: mol_type = other DNA
aacaccaaggaacctactgg

SEQ ID NO: 60941 - DNA, 20 bp, synthetic construct
  source 1..20: mol_type = other DNA
acactgacgcaggtagggcg

SEQ ID NO: 60942 - DNA, 20 bp, synthetic construct
  source 1..20: mol_type = other DNA
gtaagttctctgcctggtgt

SEQ ID NO: 60943 - DNA, 20 bp, synthetic construct
  source 1..20: mol_type = other DNA
gccaaaatcctgcacatcga

SEQ ID NO: 60944 - DNA, 20 bp, synthetic construct
  source 1..20: mol_type = other DNA
gagcagaagatgaaagggcc

SEQ ID NO: 60945 - DNA, 20 bp, synthetic construct
  source 1..20: mol_type = other DNA
aagtatgccaggctggcttt

SEQ ID NO: 60946 - DNA, 20 bp, synthetic construct
  source 1..20: mol_type = other DNA
ctgccagaaattgtttggtg

SEQ ID NO: 60947 - DNA, 20 bp, synthetic construct
  source 1..20: mol_type = other DNA
gcagacgccaatgagccgca

SEQ ID NO: 60948 - DNA, 20 bp, synthetic construct
  source 1..20: mol_type = other DNA
ctccaagatgaagcccctgt

SEQ ID NO: 60949 - DNA, 20 bp, synthetic construct
  source 1..20: mol_type = other DNA
gcaggggcacctgctggtag

SEQ ID NO: 60950 - DNA, 20 bp, synthetic construct
  source 1..20: mol_type = other DNA
gatccacatgggcaaaggat

SEQ ID NO: 60951 - DNA, 20 bp, synthetic construct
  source 1..20: mol_type = other DNA
cccatagctccagacatcgc

SEQ ID NO: 60952 - DNA, 20 bp, synthetic construct
  source 1..20: mol_type = other DNA
cttagccatgcgctacgcac

SEQ ID NO: 60953 - DNA, 20 bp, synthetic construct
  source 1..20: mol_type = other DNA
agcaatggaaccattatcca

SEQ ID NO: 60954 - DNA, 20 bp, synthetic construct
  source 1..20: mol_type = other DNA
cccaacagcgacatggccct

SEQ ID NO: 60955 - DNA, 20 bp, synthetic construct
  source 1..20: mol_type = other DNA
ggtcacctgaaggccgtaaa

SEQ ID NO: 60956 - DNA, 20 bp, synthetic construct
  source 1..20: mol_type = other DNA
gtagatccagcagtcactca

SEQ ID NO: 60957 - DNA, 20 bp, synthetic construct
  source 1..20: mol_type = other DNA
caggatcgaccgagcccagg

SEQ ID NO: 60958 - DNA, 20 bp, synthetic construct
  source 1..20: mol_type = other DNA
cacttacggttcgggctcca

SEQ ID NO: 60959 - DNA, 20 bp, synthetic construct
  source 1..20: mol_type = other DNA
gacagatcaatggctacaca

SEQ ID NO: 60960 - DNA, 20 bp, synthetic construct
  source 1..20: mol_type = other DNA
ggagatgttttgaaggtagg

SEQ ID NO: 60961 - DNA, 20 bp, synthetic construct
  source 1..20: mol_type = other DNA
tgagtacagctcctgttccc

SEQ ID NO: 60962 - DNA, 20 bp, synthetic construct
  source 1..20: mol_type = other DNA
gtgaactggctggcccacaa

SEQ ID NO: 60963 - DNA, 20 bp, synthetic construct
  source 1..20: mol_type = other DNA
tggcgatggtgtctgaacgg

SEQ ID NO: 60964 - DNA, 20 bp, synthetic construct
  source 1..20: mol_type = other DNA
ttcataatctggtagacgtg

SEQ ID NO: 60965 - DNA, 20 bp, synthetic construct
  source 1..20: mol_type = other DNA
ccaggtgctgtcccacaacc

SEQ ID NO: 60966 - DNA, 20 bp, synthetic construct
  source 1..20: mol_type = other DNA
tcacctggatgatggactgc

SEQ ID NO: 60967 - DNA, 20 bp, synthetic construct
  source 1..20: mol_type = other DNA
ccagagtaaagtttgcgctc

SEQ ID NO: 60968 - DNA, 20 bp, synthetic construct
  source 1..20: mol_type = other DNA
agcttggaggtgagcttggg

SEQ ID NO: 60969 - DNA, 20 bp, synthetic construct
  source 1..20: mol_type = other DNA
agcgcactgtggaccggcag

SEQ ID NO: 60970 - DNA, 20 bp, synthetic construct
  source 1..20: mol_type = other DNA
tagttgatgagaagagggat

SEQ ID NO: 60971 - DNA, 20 bp, synthetic construct
  source 1..20: mol_type = other DNA
ctggtgcatgatctgcgcct

SEQ ID NO: 60972 - DNA, 20 bp, synthetic construct
  source 1..20: mol_type = other DNA
ctgagctcccgctgcccagg

SEQ ID NO: 60973 - DNA, 20 bp, synthetic construct
  source 1..20: mol_type = other DNA
gtgattcataatctggtaga

SEQ ID NO: 60974 - DNA, 20 bp, synthetic construct
  source 1..20: mol_type = other DNA
ctccccagacactccttgtg

SEQ ID NO: 60975 - DNA, 20 bp, synthetic construct
  source 1..20: mol_type = other DNA
ggatcgaccgagcccaggtg

SEQ ID NO: 60976 - DNA, 20 bp, synthetic construct
  source 1..20: mol_type = other DNA
tggtgggaggtacaggctgg

SEQ ID NO: 60977 - DNA, 20 bp, synthetic construct
  source 1..20: mol_type = other DNA
attggagagcatactgttcc

SEQ ID NO: 60978 - DNA, 20 bp, synthetic construct
  source 1..20: mol_type = other DNA
agaggaggctgaagtaatga

SEQ ID NO: 60979 - DNA, 20 bp, synthetic construct
  source 1..20: mol_type = other DNA
gagactggcggagctggcgg

SEQ ID NO: 60980 - DNA, 20 bp, synthetic construct
  source 1..20: mol_type = other DNA
gaaggcgtccggggacatgc

SEQ ID NO: 60981 - DNA, 20 bp, synthetic construct
  source 1..20: mol_type = other DNA
gtcccgcagggtgaacctcc

SEQ ID NO: 60982 - DNA, 20 bp, synthetic construct
  source 1..20: mol_type = other DNA
gactgggaaagagcccactc

SEQ ID NO: 60983 - DNA, 20 bp, synthetic construct
  source 1..20: mol_type = other DNA
ctgagctgtgcgtagcgcat

SEQ ID NO: 60984 - DNA, 20 bp, synthetic construct
  source 1..20: mol_type = other DNA
gcaacacactgtaaaaccaa

SEQ ID NO: 60985 - DNA, 20 bp, synthetic construct
  source 1..20: mol_type = other DNA
gcagatatcgtcacaagaga

SEQ ID NO: 60986 - DNA, 20 bp, synthetic construct
  source 1..20: mol_type = other DNA
cttaagctggttgggtgagg

SEQ ID NO: 60987 - DNA, 20 bp, synthetic construct
  source 1..20: mol_type = other DNA
ttcctccaactacgatcctt

SEQ ID NO: 60988 - DNA, 20 bp, synthetic construct
  source 1..20: mol_type = other DNA
gtacatcctggacaaggtgg

SEQ ID NO: 60989 - DNA, 20 bp, synthetic construct
  source 1..20: mol_type = other DNA
ggacaagatcggcgaggagc

SEQ ID NO: 60990 - DNA, 20 bp, synthetic construct
  source 1..20: mol_type = other DNA
ccgggaaaagtgattcgagg

SEQ ID NO: 60991 - DNA, 20 bp, synthetic construct
  source 1..20: mol_type = other DNA
gcagctggtggagtatctga

SEQ ID NO: 60992 - DNA, 20 bp, synthetic construct
  source 1..20: mol_type = other DNA
ccacctggagacacacacac

SEQ ID NO: 60993 - DNA, 20 bp, synthetic construct
  source 1..20: mol_type = other DNA
accaagtttggaatcaaccg

SEQ ID NO: 60994 - DNA, 20 bp, synthetic construct
  source 1..20: mol_type = other DNA
ttaaatagaaatgactacga

SEQ ID NO: 60995 - DNA, 20 bp, synthetic construct
  source 1..20: mol_type = other DNA
aacgaggtcaagcgagacaa

SEQ ID NO: 60996 - DNA, 20 bp, synthetic construct
  source 1..20: mol_type = other DNA
aggggagatgtagaagccac

SEQ ID NO: 60997 - DNA, 20 bp, synthetic construct
  source 1..20: mol_type = other DNA
tacttacttgggaaactgga

SEQ ID NO: 60998 - DNA, 20 bp, synthetic construct
  source 1..20: mol_type = other DNA
tgatgatgtctccacccttc

SEQ ID NO: 60999 - DNA, 20 bp, synthetic construct
  source 1..20: mol_type = other DNA
ttgagttggatgttggcgat

SEQ ID NO: 61000 - DNA, 20 bp, synthetic construct
  source 1..20: mol_type = other DNA
cgccagggtgagattctgct

SEQ ID NO: 61001 - DNA, 20 bp, synthetic construct
  source 1..20: mol_type = other DNA
ctgaaggagctggccaaaaa

SEQ ID NO: 61002 - DNA, 20 bp, synthetic construct
  source 1..20: mol_type = other DNA
tggccagcagctcgcagcgt

SEQ ID NO: 61003 - DNA, 20 bp, synthetic construct
  source 1..20: mol_type = other DNA
ctggagcagtgttctcttaa

SEQ ID NO: 61004 - DNA, 20 bp, synthetic construct
  source 1..20: mol_type = other DNA
aggtgaggatgaatgggaca

SEQ ID NO: 61005 - DNA, 20 bp, synthetic construct
  source 1..20: mol_type = other DNA
atagagcttctccctcgtct

SEQ ID NO: 61006 - DNA, 20 bp, synthetic construct
  source 1..20: mol_type = other DNA
gggctacctgtggaagcgag

SEQ ID NO: 61007 - DNA, 20 bp, synthetic construct
  source 1..20: mol_type = other DNA
taccgtcagccgctctcgga

SEQ ID NO: 61008 - DNA, 20 bp, synthetic construct
  source 1..20: mol_type = other DNA
aactttaaagtccgcttctt

SEQ ID NO: 61009 - DNA, 20 bp, synthetic construct
  source 1..20: mol_type = other DNA
ggaaacttggcccctaagga

SEQ ID NO: 61010 - DNA, 20 bp, synthetic construct
  source 1..20: mol_type = other DNA
gcatggaggcccgggcctgt

SEQ ID NO: 61011 - DNA, 20 bp, synthetic construct
  source 1..20: mol_type = other DNA
caacgtcctgctggttaacc

SEQ ID NO: 61012 - DNA, 20 bp, synthetic construct
  source 1..20: mol_type = other DNA
tttggagaggccaaagtcgc

SEQ ID NO: 61013 - DNA, 20 bp, synthetic construct
  source 1..20: mol_type = other DNA
ggcctcaccggctgtagctg

SEQ ID NO: 61014 - DNA, 20 bp, synthetic construct
  source 1..20: mol_type = other DNA
tgaaaccatctgtgggggcg

SEQ ID NO: 61015 - DNA, 20 bp, synthetic construct
  source 1..20: mol_type = other DNA
taccttgaaagttggcatag

SEQ ID NO: 61016 - DNA, 20 bp, synthetic construct
  source 1..20: mol_type = other DNA
ctcagtagagaagacactga

SEQ ID NO: 61017 - DNA, 20 bp, synthetic construct
  source 1..20: mol_type = other DNA
aacacactgtaaaaccaatg

SEQ ID NO: 61018 - DNA, 20 bp, synthetic construct
  source 1..20: mol_type = other DNA
ccccagtggactgctgggac

SEQ ID NO: 61019 - DNA, 20 bp, synthetic construct
  source 1..20: mol_type = other DNA
tactacaacgggcacacgaa

SEQ ID NO: 61020 - DNA, 20 bp, synthetic construct
  source 1..20: mol_type = other DNA
ggaactgctcaagtccatct

SEQ ID NO: 61021 - DNA, 20 bp, synthetic construct
  source 1..20: mol_type = other DNA
ccgctactgcagccaggtgg

SEQ ID NO: 61022 - DNA, 20 bp, synthetic construct
  source 1..20: mol_type = other DNA
caggtacgcaggccccatgg

SEQ ID NO: 61023 - DNA, 20 bp, synthetic construct
  source 1..20: mol_type = other DNA
aggagccgtgagtgttcccg

SEQ ID NO: 61024 - DNA, 20 bp, synthetic construct
  source 1..20: mol_type = other DNA
ccttacactgacgcaggtag

SEQ ID NO: 61025 - DNA, 20 bp, synthetic construct
  source 1..20: mol_type = other DNA
cgaagcacacagccccacaa

SEQ ID NO: 61026 - DNA, 20 bp, synthetic construct
  source 1..20: mol_type = other DNA
caaagtagcagaggcagctg

SEQ ID NO: 61027 - DNA, 20 bp, synthetic construct
  source 1..20: mol_type = other DNA
cttgagctgctccttgtcgt

SEQ ID NO: 61028 - DNA, 20 bp, synthetic construct
  source 1..20: mol_type = other DNA
tggatggctgccgaagagcg

SEQ ID NO: 61029 - DNA, 20 bp, synthetic construct
  source 1..20: mol_type = other DNA
ctctccaggttgacgatgca

SEQ ID NO: 61030 - DNA, 20 bp, synthetic construct
  source 1..20: mol_type = other DNA
gtggaagcgcacatcgtgca

SEQ ID NO: 61031 - DNA, 20 bp, synthetic construct
  source 1..20: mol_type = other DNA
taccatgaaggctccttctt

SEQ ID NO: 61032 - DNA, 20 bp, synthetic construct
  source 1..20: mol_type = other DNA
caggctatggaacacactga

SEQ ID NO: 61033 - DNA, 20 bp, synthetic construct
  source 1..20: mol_type = other DNA
gctatgtggtcttcttggag

SEQ ID NO: 61034 - DNA, 20 bp, synthetic construct
  source 1..20: mol_type = other DNA
atggaggaggaatgtaagct

SEQ ID NO: 61035 - DNA, 20 bp, synthetic construct
  source 1..20: mol_type = other DNA
cccacagatggtttcacgaa

SEQ ID NO: 61036 - DNA, 20 bp, synthetic construct
  source 1..20: mol_type = other DNA
gatcaagttctcagatgtcc

SEQ ID NO: 61037 - DNA, 20 bp, synthetic construct
  source 1..20: mol_type = other DNA
agttcaccatctgcaagtca

SEQ ID NO: 61038 - DNA, 20 bp, synthetic construct
  source 1..20: mol_type = other DNA
agtagcgtaggccacggctc

SEQ ID NO: 61039 - DNA, 20 bp, synthetic construct
  source 1..20: mol_type = other DNA
agctcaatggaccccttcag

SEQ ID NO: 61040 - DNA, 20 bp, synthetic construct
  source 1..20: mol_type = other DNA
ggcagcagctttctgggagg

SEQ ID NO: 61041 - DNA, 20 bp, synthetic construct
  source 1..20: mol_type = other DNA
gtggagcgggagcgggacca

SEQ ID NO: 61042 - DNA, 20 bp, synthetic construct
  source 1..20: mol_type = other DNA
agcagctccacgcgcgtcag

SEQ ID NO: 61043 - DNA, 20 bp, synthetic construct
  source 1..20: mol_type = other DNA
ggacgagctgaccttcatca

SEQ ID NO: 61044 - DNA, 20 bp, synthetic construct
  source 1..20: mol_type = other DNA
gggtgaccacagcgtagagc

SEQ ID NO: 61045 - DNA, 20 bp, synthetic construct
  source 1..20: mol_type = other DNA
gattcataatctggtagacg

SEQ ID NO: 61046 - DNA, 20 bp, synthetic construct
  source 1..20: mol_type = other DNA
acggccaagaagaactatcg

SEQ ID NO: 61047 - DNA, 20 bp, synthetic construct
  source 1..20: mol_type = other DNA
acaagtgctgcgggttgccc

SEQ ID NO: 61048 - DNA, 20 bp, synthetic construct
  source 1..20: mol_type = other DNA
atcatgacattggaaaactc

SEQ ID NO: 61049 - DNA, 20 bp, synthetic construct
  source 1..20: mol_type = other DNA
acacgaagcaggtcctactc

SEQ ID NO: 61050 - DNA, 20 bp, synthetic construct
  source 1..20: mol_type = other DNA
cagcatgaccgtgttcatgc

SEQ ID NO: 61051 - DNA, 20 bp, synthetic construct
  source 1..20: mol_type = other DNA
gtgttgcagctgcttcatga

SEQ ID NO: 61052 - DNA, 20 bp, synthetic construct
  source 1..20: mol_type = other DNA
cccttgcagaatactctgaa

SEQ ID NO: 61053 - DNA, 20 bp, synthetic construct
  source 1..20: mol_type = other DNA
catttgacactggccacagg

SEQ ID NO: 61054 - DNA, 20 bp, synthetic construct
  source 1..20: mol_type = other DNA
cgtaggtgatgtccccgctg

SEQ ID NO: 61055 - DNA, 20 bp, synthetic construct
  source 1..20: mol_type = other DNA
ggacttgatcaagtctcttg

SEQ ID NO: 61056 - DNA, 20 bp, synthetic construct
  source 1..20: mol_type = other DNA
aagcccagatctccgtcgtg

SEQ ID NO: 61057 - DNA, 20 bp, synthetic construct
  source 1..20: mol_type = other DNA
ggcaacacagtttcacaaac

SEQ ID NO: 61058 - DNA, 20 bp, synthetic construct
  source 1..20: mol_type = other DNA
cacagcgacacggtggagga

SEQ ID NO: 61059 - DNA, 20 bp, synthetic construct
  source 1..20: mol_type = other DNA
cttacagatgagtagagctt

SEQ ID NO: 61060 - DNA, 20 bp, synthetic construct
  source 1..20: mol_type = other DNA
tcctggtagacctcgtggat

SEQ ID NO: 61061 - DNA, 20 bp, synthetic construct
  source 1..20: mol_type = other DNA
ggcaggaagcagatcgacgt

SEQ ID NO: 61062 - DNA, 20 bp, synthetic construct
  source 1..20: mol_type = other DNA
gagaaggaagagctgcagca

SEQ ID NO: 61063 - DNA, 20 bp, synthetic construct
  source 1..20: mol_type = other DNA
cctgggatggggctcaggtg

SEQ ID NO: 61064 - DNA, 20 bp, synthetic construct
  source 1..20: mol_type = other DNA
gaggaggcccgccaggcaga

SEQ ID NO: 61065 - DNA, 20 bp, synthetic construct
  source 1..20: mol_type = other DNA
tgccagagctggaccctgag

SEQ ID NO: 61066 - DNA, 20 bp, synthetic construct
  source 1..20: mol_type = other DNA
atgtagaatgtccaacagcc

SEQ ID NO: 61067 - DNA, 20 bp, synthetic construct
  source 1..20: mol_type = other DNA
cgcttctacaggatcgaccg

SEQ ID NO: 61068 - DNA, 20 bp, synthetic construct
  source 1..20: mol_type = other DNA
gcagcacggggtgctcctcg

SEQ ID NO: 61069 - DNA, 20 bp, synthetic construct
  source 1..20: mol_type = other DNA
aacttccagacccctggtga

SEQ ID NO: 61070 - DNA, 20 bp, synthetic construct
  source 1..20: mol_type = other DNA
ccagggcctccttgcggtcg

SEQ ID NO: 61071 - DNA, 20 bp, synthetic construct
  source 1..20: mol_type = other DNA
tcagcaggtattccacctgg

SEQ ID NO: 61072 - DNA, 20 bp, synthetic construct
  source 1..20: mol_type = other DNA
cgcttccaccactttcccat

SEQ ID NO: 61073 - DNA, 20 bp, synthetic construct
  source 1..20: mol_type = other DNA
ggacaacccctacatcgtgc

SEQ ID NO: 61074 - DNA, 20 bp, synthetic construct
  source 1..20: mol_type = other DNA
cactcacttgtagatccagc

SEQ ID NO: 61075 - DNA, 20 bp, synthetic construct
  source 1..20: mol_type = other DNA
gaaccagccgctggtgttgc

SEQ ID NO: 61076 - DNA, 20 bp, synthetic construct
  source 1..20: mol_type = other DNA
ccatgcccgccagcttcagg

SEQ ID NO: 61077 - DNA, 20 bp, synthetic construct
  source 1..20: mol_type = other DNA
ccatacagggttgagtccat

SEQ ID NO: 61078 - DNA, 20 bp, synthetic construct
  source 1..20: mol_type = other DNA
atacccctgccgcctggagc

SEQ ID NO: 61079 - DNA, 20 bp, synthetic construct
  source 1..20: mol_type = other DNA
catccaagatcaaccgagca

SEQ ID NO: 61080 - DNA, 20 bp, synthetic construct
  source 1..20: mol_type = other DNA
tgagctggtgacacacacaa

SEQ ID NO: 61081 - DNA, 20 bp, synthetic construct
  source 1..20: mol_type = other DNA
agctatggggtcaccatgtg

SEQ ID NO: 61082 - DNA, 20 bp, synthetic construct
  source 1..20: mol_type = other DNA
agagtgagtcggaggctgga

SEQ ID NO: 61083 - DNA, 20 bp, synthetic construct
  source 1..20: mol_type = other DNA
cactccacattctcccacaa

SEQ ID NO: 61084 - DNA, 20 bp, synthetic construct
  source 1..20: mol_type = other DNA
ttcgaagagctcgctccgct

SEQ ID NO: 61085 - DNA, 20 bp, synthetic construct
  source 1..20: mol_type = other DNA
tctgcaccagcgtcttggcc

SEQ ID NO: 61086 - DNA, 20 bp, synthetic construct
  source 1..20: mol_type = other DNA
tcaccagctcactgaaggga

SEQ ID NO: 61087 - DNA, 20 bp, synthetic construct
  source 1..20: mol_type = other DNA
agagagcgtgtagtcgccca

SEQ ID NO: 61088 - DNA, 20 bp, synthetic construct
  source 1..20: mol_type = other DNA
ccgtgtacaggttgtgggac

SEQ ID NO: 61089 - DNA, 20 bp, synthetic construct
  source 1..20: mol_type = other DNA
gacaagtaccctctgatcat

SEQ ID NO: 61090 - DNA, 20 bp, synthetic construct
  source 1..20: mol_type = other DNA
gtacttgtcctcagacagga

SEQ ID NO: 61091 - DNA, 20 bp, synthetic construct
  source 1..20: mol_type = other DNA
cacagatccacatgggcaaa

SEQ ID NO: 61092 - DNA, 20 bp, synthetic construct
  source 1..20: mol_type = other DNA
gccatagtgagccagagact

SEQ ID NO: 61093 - DNA, 20 bp, synthetic construct
  source 1..20: mol_type = other DNA
ctcatgaggctgtgctggaa

SEQ ID NO: 61094 - DNA, 20 bp, synthetic construct
  source 1..20: mol_type = other DNA
ttggaacacgaccgcaagga

SEQ ID NO: 61095 - DNA, 20 bp, synthetic construct
  source 1..20: mol_type = other DNA
cttccaccactttcccatcg

SEQ ID NO: 61096 - DNA, 20 bp, synthetic construct
  source 1..20: mol_type = other DNA
ctcacctggcagtctgtggc

SEQ ID NO: 61097 - DNA, 20 bp, synthetic construct
  source 1..20: mol_type = other DNA
ctcagttcatcctcacctga

SEQ ID NO: 61098 - DNA, 20 bp, synthetic construct
  source 1..20: mol_type = other DNA
ggcgtaggtgccgttgagct

SEQ ID NO: 61099 - DNA, 20 bp, synthetic construct
  source 1..20: mol_type = other DNA
acccctcacctcgagttgga

SEQ ID NO: 61100 - DNA, 20 bp, synthetic construct
  source 1..20: mol_type = other DNA
tcttcacacagaacatgcag

SEQ ID NO: 61101 - DNA, 20 bp, synthetic construct
  source 1..20: mol_type = other DNA
cacttggagtggttttgact

SEQ ID NO: 61102 - DNA, 20 bp, synthetic construct
  source 1..20: mol_type = other DNA
cttgtgaagggctgagggca

SEQ ID NO: 61103 - DNA, 20 bp, synthetic construct
  source 1..20: mol_type = other DNA
ccatccacacctccccgaac

SEQ ID NO: 61104 - DNA, 20 bp, synthetic construct
  source 1..20: mol_type = other DNA
ttcttccaggaggataaagt

SEQ ID NO: 61105 - DNA, 20 bp, synthetic construct
  source 1..20: mol_type = other DNA
gatagaaggtacctctgaga

SEQ ID NO: 61106 - DNA, 20 bp, synthetic construct
  source 1..20: mol_type = other DNA
gaggaactcatctcttgtga

SEQ ID NO: 61107 - DNA, 20 bp, synthetic construct
  source 1..20: mol_type = other DNA
aggccaaggacctgcaacgc

SEQ ID NO: 61108 - DNA, 20 bp, synthetic construct
  source 1..20: mol_type = other DNA
gagcgggacagctacaatga

SEQ ID NO: 61109 - DNA, 20 bp, synthetic construct
  source 1..20: mol_type = other DNA
gaggacgccttgtgggagaa

SEQ ID NO: 61110 - DNA, 20 bp, synthetic construct
  source 1..20: mol_type = other DNA
tcactggagaactggtcccc

SEQ ID NO: 61111 - DNA, 20 bp, synthetic construct
  source 1..20: mol_type = other DNA
gaagttgaagaggcaccaga

SEQ ID NO: 61112 - DNA, 20 bp, synthetic construct
  source 1..20: mol_type = other DNA
gcaggtactggaattccatg

SEQ ID NO: 61113 - DNA, 20 bp, synthetic construct
  source 1..20: mol_type = other DNA
ccacccaggccgggaagcgc

SEQ ID NO: 61114 - DNA, 20 bp, synthetic construct
  source 1..20: mol_type = other DNA
aacatacaaattctggaggt

SEQ ID NO: 61115 - DNA, 20 bp, synthetic construct
  source 1..20: mol_type = other DNA
cgggagcaccccaagctcaa

SEQ ID NO: 61116 - DNA, 20 bp, synthetic construct
  source 1..20: mol_type = other DNA
tccagacacatgcccagcag

SEQ ID NO: 61117 - DNA, 20 bp, synthetic construct
  source 1..20: mol_type = other DNA
gagggagaagctctatggta

SEQ ID NO: 61118 - DNA, 20 bp, synthetic construct
  source 1..20: mol_type = other DNA
atccacagagacttggtatg

SEQ ID NO: 61119 - DNA, 20 bp, synthetic construct
  source 1..20: mol_type = other DNA
atccacaggggcttcatctt

SEQ ID NO: 61120 - DNA, 20 bp, synthetic construct
  source 1..20: mol_type = other DNA
ttcccagggtcgagcacttg

SEQ ID NO: 61121 - DNA, 20 bp, synthetic construct
  source 1..20: mol_type = other DNA
cttactggccccctcgatct

SEQ ID NO: 61122 - DNA, 20 bp, synthetic construct
  source 1..20: mol_type = other DNA
gtcaccaggcctgggttgat

SEQ ID NO: 61123 - DNA, 20 bp, synthetic construct
  source 1..20: mol_type = other DNA
cctcccaccacggcttctgg

SEQ ID NO: 61124 - DNA, 20 bp, synthetic construct
  source 1..20: mol_type = other DNA
gaacacaatggccacttgtc

SEQ ID NO: 61125 - DNA, 20 bp, synthetic construct
  source 1..20: mol_type = other DNA
ttcggcagccatccagatgg

SEQ ID NO: 61126 - DNA, 20 bp, synthetic construct
  source 1..20: mol_type = other DNA
cagcatggaagctgttgcca

SEQ ID NO: 61127 - DNA, 20 bp, synthetic construct
  source 1..20: mol_type = other DNA
actctgaggccacaaaggca

SEQ ID NO: 61128 - DNA, 20 bp, synthetic construct
  source 1..20: mol_type = other DNA
tgtcaaacttggtgccctcg

SEQ ID NO: 61129 - DNA, 20 bp, synthetic construct
  source 1..20: mol_type = other DNA
ctccagccgcagcgatgtct

SEQ ID NO: 61130 - DNA, 20 bp, synthetic construct
  source 1..20: mol_type = other DNA
ggaccaccacagtgcccagc

SEQ ID NO: 61131 - DNA, 20 bp, synthetic construct
  source 1..20: mol_type = other DNA
catgaactcctgcacctgga

SEQ ID NO: 61132 - DNA, 20 bp, synthetic construct
  source 1..20: mol_type = other DNA
ctgcagccggatcgccatct

SEQ ID NO: 61133 - DNA, 20 bp, synthetic construct
  source 1..20: mol_type = other DNA
ctgatggaggatacattgca

SEQ ID NO: 61134 - DNA, 20 bp, synthetic construct
  source 1..20: mol_type = other DNA
ggaggaacatgtggctccac

SEQ ID NO: 61135 - DNA, 20 bp, synthetic construct
  source 1..20: mol_type = other DNA
agcacgatggggtagatgtt

SEQ ID NO: 61136 - DNA, 20 bp, synthetic construct
  source 1..20: mol_type = other DNA
atggaacggaggaagaagat

SEQ ID NO: 61137 - DNA, 20 bp, synthetic construct
  source 1..20: mol_type = other DNA
gtgcagaaaggtatacatca

SEQ ID NO: 61138 - DNA, 20 bp, synthetic construct
  source 1..20: mol_type = other DNA
aagaagcggactttaaagtt

SEQ ID NO: 61139 - DNA, 20 bp, synthetic construct
  source 1..20: mol_type = other DNA
ccgaacctggaagctgtgca

SEQ ID NO: 61140 - DNA, 20 bp, synthetic construct
  source 1..20: mol_type = other DNA
caggtagccctgccagccgg

SEQ ID NO: 61141 - DNA, 20 bp, synthetic construct
  source 1..20: mol_type = other DNA
ctgttggatcttactgaata

SEQ ID NO: 61142 - DNA, 20 bp, synthetic construct
  source 1..20: mol_type = other DNA
accagcaggacgttgcgggc

SEQ ID NO: 61143 - DNA, 20 bp, synthetic construct
  source 1..20: mol_type = other DNA
cttaagagaacactgctcca

SEQ ID NO: 61144 - DNA, 20 bp, synthetic construct
  source 1..20: mol_type = other DNA
agtcctcacgtggttcacag

SEQ ID NO: 61145 - DNA, 20 bp, synthetic construct
  source 1..20: mol_type = other DNA
ggtgcgtagataatctgaca

SEQ ID NO: 61146 - DNA, 20 bp, synthetic construct
  source 1..20: mol_type = other DNA
ccttcaaaacatctccagtg

SEQ ID NO: 61147 - DNA, 20 bp, synthetic construct
  source 1..20: mol_type = other DNA
ccccatgaccccgtggccct

SEQ ID NO: 61148 - DNA, 20 bp, synthetic construct
  source 1..20: mol_type = other DNA
tccaccactcgccgctcctg

SEQ ID NO: 61149 - DNA, 20 bp, synthetic construct
  source 1..20: mol_type = other DNA
ttctccagtgagtcctcctt

SEQ ID NO: 61150 - DNA, 20 bp, synthetic construct
  source 1..20: mol_type = other DNA
accccagtgtgttgttttcc

SEQ ID NO: 61151 - DNA, 20 bp, synthetic construct
  source 1..20: mol_type = other DNA
ggcaaggtgagctgcacact

SEQ ID NO: 61152 - DNA, 20 bp, synthetic construct
  source 1..20: mol_type = other DNA
gatgaacgaggtcatcaagc

SEQ ID NO: 61153 - DNA, 20 bp, synthetic construct
  source 1..20: mol_type = other DNA
tccccaggcccgctcagcag

SEQ ID NO: 61154 - DNA, 20 bp, synthetic construct
  source 1..20: mol_type = other DNA
gctgcagtccatcatccagg

SEQ ID NO: 61155 - DNA, 20 bp, synthetic construct
  source 1..20: mol_type = other DNA
ctctaggtcactgtctcctg

SEQ ID NO: 61156 - DNA, 20 bp, synthetic construct
  source 1..20: mol_type = other DNA
cttcccaggttcgttctgga

SEQ ID NO: 61157 - DNA, 20 bp, synthetic construct
  source 1..20: mol_type = other DNA
cgctggacgtggagaagagt

SEQ ID NO: 61158 - DNA, 20 bp, synthetic construct
  source 1..20: mol_type = other DNA
caggtagaggatgccattct

SEQ ID NO: 61159 - DNA, 20 bp, synthetic construct
  source 1..20: mol_type = other DNA
ggaagctgagcatgaactcc

SEQ ID NO: 61160 - DNA, 20 bp, synthetic construct
  source 1..20: mol_type = other DNA
caaagcccagatctccgtcg

SEQ ID NO: 61161 - DNA, 20 bp, synthetic construct
  source 1..20: mol_type = other DNA
gcttcaggacatcttggatg

SEQ ID NO: 61162 - DNA, 20 bp, synthetic construct
  source 1..20: mol_type = other DNA
cacttgagcggccacttccc

SEQ ID NO: 61163 - DNA, 20 bp, synthetic construct
  source 1..20: mol_type = other DNA
gcgcaggttgacctcacgca

SEQ ID NO: 61164 - DNA, 20 bp, synthetic construct
  source 1..20: mol_type = other DNA
gcccacttcaccgggaattt

SEQ ID NO: 61165 - DNA, 20 bp, synthetic construct
  source 1..20: mol_type = other DNA
gtgtcagacaccagaatgtt

SEQ ID NO: 61166 - DNA, 20 bp, synthetic construct
  source 1..20: mol_type = other DNA
atgctgcagtggtcctcaat

SEQ ID NO: 61167 - DNA, 20 bp, synthetic construct
  source 1..20: mol_type = other DNA
cccactcgtcctcccaccac

SEQ ID NO: 61168 - DNA, 20 bp, synthetic construct
  source 1..20: mol_type = other DNA
tgacaaactgtccagaaaca

SEQ ID NO: 61169 - DNA, 20 bp, synthetic construct
  source 1..20: mol_type = other DNA
gttcatgtagtcactgtgca

SEQ ID NO: 61170 - DNA, 20 bp, synthetic construct
  source 1..20: mol_type = other DNA
agaagataagaaaatcactg

SEQ ID NO: 61171 - DNA, 20 bp, synthetic construct
  source 1..20: mol_type = other DNA
ggaacaccaaggaacctact

SEQ ID NO: 61172 - DNA, 20 bp, synthetic construct
  source 1..20: mol_type = other DNA
gtccaggatgtacttgttga

SEQ ID NO: 61173 - DNA, 20 bp, synthetic construct
  source 1..20: mol_type = other DNA
ctctcgtaaggggtctcgga

SEQ ID NO: 61174 - DNA, 20 bp, synthetic construct
  source 1..20: mol_type = other DNA
ccaggatataaatctcatcc

SEQ ID NO: 61175 - DNA, 20 bp, synthetic construct
  source 1..20: mol_type = other DNA
caggacctccaccacctccc

SEQ ID NO: 61176 - DNA, 20 bp, synthetic construct
  source 1..20: mol_type = other DNA
cctcctaggatacagagcag

SEQ ID NO: 61177 - DNA, 20 bp, synthetic construct
  source 1..20: mol_type = other DNA
gatgagctcctggtagacct

SEQ ID NO: 61178 - DNA, 20 bp, synthetic construct
  source 1..20: mol_type = other DNA
ggcgctcatctcatacgtgc

SEQ ID NO: 61179 - DNA, 20 bp, synthetic construct
  source 1..20: mol_type = other DNA
gtgcccagcggcacagctgg

SEQ ID NO: 61180 - DNA, 20 bp, synthetic construct
  source 1..20: mol_type = other DNA
ccactggtagtgaggaatag

SEQ ID NO: 61181 - DNA, 20 bp, synthetic construct
  source 1..20: mol_type = other DNA
gactcactgctccaggatgc

SEQ ID NO: 61182 - DNA, 20 bp, synthetic construct
  source 1..20: mol_type = other DNA
gtctaccaggagctcatcca

SEQ ID NO: 61183 - DNA, 20 bp, synthetic construct
  source 1..20: mol_type = other DNA
gcgccgcagcttgctctcca

SEQ ID NO: 61184 - DNA, 20 bp, synthetic construct
  source 1..20: mol_type = other DNA
ggcccacgagcggatgccct

SEQ ID NO: 61185 - DNA, 20 bp, synthetic construct
  source 1..20: mol_type = other DNA
gagcagcgcaagaccatctg

SEQ ID NO: 61186 - DNA, 20 bp, synthetic construct
  source 1..20: mol_type = other DNA
caggtacctgaccggggacc

SEQ ID NO: 61187 - DNA, 20 bp, synthetic construct
  source 1..20: mol_type = other DNA
gcgggcaagtactgcattcc

SEQ ID NO: 61188 - DNA, 20 bp, synthetic construct
  source 1..20: mol_type = other DNA
gtctcacctctccttgtatt

SEQ ID NO: 61189 - DNA, 20 bp, synthetic construct
  source 1..20: mol_type = other DNA
gaggtcataggagtctcccc

SEQ ID NO: 61190 - DNA, 20 bp, synthetic construct
  source 1..20: mol_type = other DNA
ccggccatggacggtgaggt

SEQ ID NO: 61191 - DNA, 20 bp, synthetic construct
  source 1..20: mol_type = other DNA
ctcatgcaccgtcttctggg

SEQ ID NO: 61192 - DNA, 20 bp, synthetic construct
  source 1..20: mol_type = other DNA
ccatggacacctggtgcagc

SEQ ID NO: 61193 - DNA, 20 bp, synthetic construct
  source 1..20: mol_type = other DNA
gcaacaccagcggctggttc

SEQ ID NO: 61194 - DNA, 20 bp, synthetic construct
  source 1..20: mol_type = other DNA
agactcacaagtggaaaatc

SEQ ID NO: 61195 - DNA, 20 bp, synthetic construct
  source 1..20: mol_type = other DNA
aggagaggtgagacccagct

SEQ ID NO: 61196 - DNA, 20 bp, synthetic construct
  source 1..20: mol_type = other DNA
cttggacaaaggtgtttccc

SEQ ID NO: 61197 - DNA, 20 bp, synthetic construct
  source 1..20: mol_type = other DNA
ctggacgctgacggccaaga

SEQ ID NO: 61198 - DNA, 20 bp, synthetic construct
  source 1..20: mol_type = other DNA
ccccaacagcgagtgcggtg

SEQ ID NO: 61199 - DNA, 20 bp, synthetic construct
  source 1..20: mol_type = other DNA
cttgaagcaatcctttagag

SEQ ID NO: 61200 - DNA, 20 bp, synthetic construct
  source 1..20: mol_type = other DNA
ctcatagccctgggcacctt

SEQ ID NO: 61201 - DNA, 20 bp, synthetic construct
  source 1..20: mol_type = other DNA
agtcatgttcatgtagtcac

SEQ ID NO: 61202 - DNA, 20 bp, synthetic construct
  source 1..20: mol_type = other DNA
ctgtccactcctggcgctgg

SEQ ID NO: 61203 - DNA, 20 bp, synthetic construct
  source 1..20: mol_type = other DNA
agagcttacctcctccatta

SEQ ID NO: 61204 - DNA, 20 bp, synthetic construct
  source 1..20: mol_type = other DNA
ctgcagcatgaccgtgttca

SEQ ID NO: 61205 - DNA, 20 bp, synthetic construct
  source 1..20: mol_type = other DNA
agggcaagatcaagcattgc

SEQ ID NO: 61206 - DNA, 20 bp, synthetic construct
  source 1..20: mol_type = other DNA
ccgccgcaaacagggcaacc

SEQ ID NO: 61207 - DNA, 20 bp, synthetic construct
  source 1..20: mol_type = other DNA
ggaaggccacgagggcctca

SEQ ID NO: 61208 - DNA, 20 bp, synthetic construct
  source 1..20: mol_type = other DNA
tcggcacagcgacaacatca

SEQ ID NO: 61209 - DNA, 20 bp, synthetic construct
  source 1..20: mol_type = other DNA
cttacctctcaatctgcagg

SEQ ID NO: 61210 - DNA, 20 bp, synthetic construct
  source 1..20: mol_type = other DNA
aggttccaccgtggcgtaca

SEQ ID NO: 61211 - DNA, 20 bp, synthetic construct
  source 1..20: mol_type = other DNA
ctcgaggcccgacggccggt

SEQ ID NO: 61212 - DNA, 20 bp, synthetic construct
  source 1..20: mol_type = other DNA
gatgcattcgaacgcgttgg

SEQ ID NO: 61213 - DNA, 20 bp, synthetic construct
  source 1..20: mol_type = other DNA
gccaagaagaactatcgggc

SEQ ID NO: 61214 - DNA, 20 bp, synthetic construct
  source 1..20: mol_type = other DNA
ctggaggagcttctggccca

SEQ ID NO: 61215 - DNA, 20 bp, synthetic construct
  source 1..20: mol_type = other DNA
caggaagagcttcttgtcct

SEQ ID NO: 61216 - DNA, 20 bp, synthetic construct
  source 1..20: mol_type = other DNA
ctcagacacggttgccccct

SEQ ID NO: 61217 - DNA, 20 bp, synthetic construct
  source 1..20: mol_type = other DNA
tctgagaagagagcacttac

SEQ ID NO: 61218 - DNA, 20 bp, synthetic construct
  source 1..20: mol_type = other DNA
tagagattggctgcgccagg

SEQ ID NO: 61219 - DNA, 20 bp, synthetic construct
  source 1..20: mol_type = other DNA
ccccacctggtccaggttgt

SEQ ID NO: 61220 - DNA, 20 bp, synthetic construct
  source 1..20: mol_type = other DNA
tatagaggcaatgcttggga

SEQ ID NO: 61221 - DNA, 20 bp, synthetic construct
  source 1..20: mol_type = other DNA
gagctccaggaactgccaga

SEQ ID NO: 61222 - DNA, 20 bp, synthetic construct
  source 1..20: mol_type = other DNA
cttaccgtaagcccccggaa

SEQ ID NO: 61223 - DNA, 20 bp, synthetic construct
  source 1..20: mol_type = other DNA
ggtgagctggaggagcttct

SEQ ID NO: 61224 - DNA, 20 bp, synthetic construct
  source 1..20: mol_type = other DNA
cggaagttgatgcattcggg

SEQ ID NO: 61225 - DNA, 20 bp, synthetic construct
  source 1..20: mol_type = other DNA
ccggaggtgattcagaacct

SEQ ID NO: 61226 - DNA, 20 bp, synthetic construct
  source 1..20: mol_type = other DNA
tccgagtaggacctgcttcg

SEQ ID NO: 61227 - DNA, 20 bp, synthetic construct
  source 1..20: mol_type = other DNA
tgctcaccgtatctcagccc

SEQ ID NO: 61228 - DNA, 20 bp, synthetic construct
  source 1..20: mol_type = other DNA
acgcacgggcagatcggcaa

SEQ ID NO: 61229 - DNA, 20 bp, synthetic construct
  source 1..20: mol_type = other DNA
gtacagctgagcaaactgcc

SEQ ID NO: 61230 - DNA, 20 bp, synthetic construct
  source 1..20: mol_type = other DNA
gctgagatggagctgaagga

SEQ ID NO: 61231 - DNA, 20 bp, synthetic construct
  source 1..20: mol_type = other DNA
ctcaccagctgtccactcct

SEQ ID NO: 61232 - DNA, 20 bp, synthetic construct
  source 1..20: mol_type = other DNA
tgaactgagtctggtataga

SEQ ID NO: 61233 - DNA, 20 bp, synthetic construct
  source 1..20: mol_type = other DNA
cgcctgatccaggagctcgc

SEQ ID NO: 61234 - DNA, 20 bp, synthetic construct
  source 1..20: mol_type = other DNA
gatgagctgttcttccagga

SEQ ID NO: 61235 - DNA, 20 bp, synthetic construct
  source 1..20: mol_type = other DNA
gctataccgcaagatgaagc

SEQ ID NO: 61236 - DNA, 20 bp, synthetic construct
  source 1..20: mol_type = other DNA
gcaccagtttgggatgagag

SEQ ID NO: 61237 - DNA, 20 bp, synthetic construct
  source 1..20: mol_type = other DNA
ccaggtgtccatggggatga

SEQ ID NO: 61238 - DNA, 20 bp, synthetic construct
  source 1..20: mol_type = other DNA
gtgcacgagcgacagcacat

SEQ ID NO: 61239 - DNA, 20 bp, synthetic construct
  source 1..20: mol_type = other DNA
ggccgaggccaacctcatga

SEQ ID NO: 61240 - DNA, 20 bp, synthetic construct
  source 1..20: mol_type = other DNA
tcaggctgctgtggtaccag

SEQ ID NO: 61241 - DNA, 20 bp, synthetic construct
  source 1..20: mol_type = other DNA
tccctcatacagggccccgt

SEQ ID NO: 61242 - DNA, 20 bp, synthetic construct
  source 1..20: mol_type = other DNA
tcaggatgccttccgcctct

SEQ ID NO: 61243 - DNA, 20 bp, synthetic construct
  source 1..20: mol_type = other DNA
cccatggtccctgagggaat

SEQ ID NO: 61244 - DNA, 20 bp, synthetic construct
  source 1..20: mol_type = other DNA
gccaagttcaatgtcagcta

SEQ ID NO: 61245 - DNA, 20 bp, synthetic construct
  source 1..20: mol_type = other DNA
gtggacaatggactcaaccc

SEQ ID NO: 61246 - DNA, 20 bp, synthetic construct
  source 1..20: mol_type = other DNA
actatcaccaacataatgga

SEQ ID NO: 61247 - DNA, 20 bp, synthetic construct
  source 1..20: mol_type = other DNA
gcagcagtgtgcatccagcg

SEQ ID NO: 61248 - DNA, 20 bp, synthetic construct
  source 1..20: mol_type = other DNA
agaagaactatcgggcagat

SEQ ID NO: 61249 - DNA, 20 bp, synthetic construct
  source 1..20: mol_type = other DNA
ccagcgagcgcaggcactgg

SEQ ID NO: 61250 - DNA, 20 bp, synthetic construct
  source 1..20: mol_type = other DNA
agcctgaccagagcacaggc

SEQ ID NO: 61251 - DNA, 20 bp, synthetic construct
  source 1..20: mol_type = other DNA
gccgcagctgcatggagaca

SEQ ID NO: 61252 - DNA, 20 bp, synthetic construct
  source 1..20: mol_type = other DNA
aaaggcgtaccagatggact

SEQ ID NO: 61253 - DNA, 20 bp, synthetic construct
  source 1..20: mol_type = other DNA
ccacagctgcttcttccctc

SEQ ID NO: 61254 - DNA, 20 bp, synthetic construct
  source 1..20: mol_type = other DNA
cacccacctgtccatcttgg

SEQ ID NO: 61255 - DNA, 20 bp, synthetic construct
  source 1..20: mol_type = other DNA
gccctcaccttggaaggggt

SEQ ID NO: 61256 - DNA, 20 bp, synthetic construct
  source 1..20: mol_type = other DNA
attctcacctaagcagcatc

SEQ ID NO: 61257 - DNA, 20 bp, synthetic construct
  source 1..20: mol_type = other DNA
acagttgtcagggcgcacca

SEQ ID NO: 61258 - DNA, 20 bp, synthetic construct
  source 1..20: mol_type = other DNA
gaggtagggcatgtatccct

SEQ ID NO: 61259 - DNA, 20 bp, synthetic construct
  source 1..20: mol_type = other DNA
ccacaacctgtacacggtcc

SEQ ID NO: 61260 - DNA, 20 bp, synthetic construct
  source 1..20: mol_type = other DNA
taggaagatctcatccccac

SEQ ID NO: 61261 - DNA, 20 bp, synthetic construct
  source 1..20: mol_type = other DNA
gacaccagtaggttccttgg

SEQ ID NO: 61262 - DNA, 20 bp, synthetic construct
  source 1..20: mol_type = other DNA
gggatgagatcttcctactg

SEQ ID NO: 61263 - DNA, 20 bp, synthetic construct
  source 1..20: mol_type = other DNA
cgggagatccagcagacgga

SEQ ID NO: 61264 - DNA, 20 bp, synthetic construct
  source 1..20: mol_type = other DNA
gacctccaccacctccccgc

SEQ ID NO: 61265 - DNA, 20 bp, synthetic construct
  source 1..20: mol_type = other DNA
gctgagggtgtcccggccca

SEQ ID NO: 61266 - DNA, 20 bp, synthetic construct
  source 1..20: mol_type = other DNA
gctgccaacattctggtgtc

SEQ ID NO: 61267 - DNA, 20 bp, synthetic construct
  source 1..20: mol_type = other DNA
gtaaaactccaccagctcct

SEQ ID NO: 61268 - DNA, 20 bp, synthetic construct
  source 1..20: mol_type = other DNA
cgcacagctcagtgaggaga

SEQ ID NO: 61269 - DNA, 20 bp, synthetic construct
  source 1..20: mol_type = other DNA
ttccagatgttctcctttga

SEQ ID NO: 61270 - DNA, 20 bp, synthetic construct
  source 1..20: mol_type = other DNA
tgtagaagccaccgttgtcc

SEQ ID NO: 61271 - DNA, 20 bp, synthetic construct
  source 1..20: mol_type = other DNA
gtgaaggatgcagcagaatt

SEQ ID NO: 61272 - DNA, 20 bp, synthetic construct
  source 1..20: mol_type = other DNA
caggcaggagctggtcaaca

SEQ ID NO: 61273 - DNA, 20 bp, synthetic construct
  source 1..20: mol_type = other DNA
ggagatgtagaagccaccgt

SEQ ID NO: 61274 - DNA, 20 bp, synthetic construct
  source 1..20: mol_type = other DNA
ggcagggctacctgtggaag

SEQ ID NO: 61275 - DNA, 20 bp, synthetic construct
  source 1..20: mol_type = other DNA
gctcaccatcttggtgaagg

SEQ ID NO: 61276 - DNA, 20 bp, synthetic construct
  source 1..20: mol_type = other DNA
agagacattttgatcatcta

SEQ ID NO: 61277 - DNA, 20 bp, synthetic construct
  source 1..20: mol_type = other DNA
ctcaccctgttgtcttcagg

SEQ ID NO: 61278 - DNA, 20 bp, synthetic construct
  source 1..20: mol_type = other DNA
tccgatgtgtggtcatttgg

SEQ ID NO: 61279 - DNA, 20 bp, synthetic construct
  source 1..20: mol_type = other DNA
gctgtaccaactcatgaggc

SEQ ID NO: 61280 - DNA, 20 bp, synthetic construct
  source 1..20: mol_type = other DNA
ctgtcccacaacctgtacac

SEQ ID NO: 61281 - DNA, 20 bp, synthetic construct
  source 1..20: mol_type = other DNA
gccagaccccgcggcgcacc

SEQ ID NO: 61282 - DNA, 20 bp, synthetic construct
  source 1..20: mol_type = other DNA
atgcaccgtcttctgggcgc

SEQ ID NO: 61283 - DNA, 20 bp, synthetic construct
  source 1..20: mol_type = other DNA
tggtacgcctttaccgcgct

SEQ ID NO: 61284 - DNA, 20 bp, synthetic construct
  source 1..20: mol_type = other DNA
tcgtggatggccatgctgag

SEQ ID NO: 61285 - DNA, 20 bp, synthetic construct
  source 1..20: mol_type = other DNA
aagctcagttcatcctcacc

SEQ ID NO: 61286 - DNA, 20 bp, synthetic construct
  source 1..20: mol_type = other DNA
catacttctgtaatacactt

SEQ ID NO: 61287 - DNA, 20 bp, synthetic construct
  source 1..20: mol_type = other DNA
cttacctcctccattatgtt

SEQ ID NO: 61288 - DNA, 20 bp, synthetic construct
  source 1..20: mol_type = other DNA
atatgggaattactcccagc

SEQ ID NO: 61289 - DNA, 20 bp, synthetic construct
  source 1..20: mol_type = other DNA
tggctccactgcagggaagc

SEQ ID NO: 61290 - DNA, 20 bp, synthetic construct
  source 1..20: mol_type = other DNA
agctcaccttgccaaaatcc

SEQ ID NO: 61291 - DNA, 20 bp, synthetic construct
  source 1..20: mol_type = other DNA
ttaccttgaagaagaatgat

SEQ ID NO: 61292 - DNA, 20 bp, synthetic construct
  source 1..20: mol_type = other DNA
cccagcgctgccggctctca

SEQ ID NO: 61293 - DNA, 20 bp, synthetic construct
  source 1..20: mol_type = other DNA
agatgaaggaagagcgggac

SEQ ID NO: 61294 - DNA, 20 bp, synthetic construct
  source 1..20: mol_type = other DNA
cagctggacaacccctacat

SEQ ID NO: 61295 - DNA, 20 bp, synthetic construct
  source 1..20: mol_type = other DNA
ggagagcatactgttcccgt

SEQ ID NO: 61296 - DNA, 20 bp, synthetic construct
  source 1..20: mol_type = other DNA
ttcatctgcacgtcctcccg

SEQ ID NO: 61297 - DNA, 20 bp, synthetic construct
  source 1..20: mol_type = other DNA
ttaagtaactcctttctccc

SEQ ID NO: 61298 - DNA, 20 bp, synthetic construct
  source 1..20: mol_type = other DNA
tggaaggcctgccagggaga

SEQ ID NO: 61299 - DNA, 20 bp, synthetic construct
  source 1..20: mol_type = other DNA
cagcagctcgcagcgttgca

SEQ ID NO: 61300 - DNA, 20 bp, synthetic construct
  source 1..20: mol_type = other DNA
cacctaagcagcatctgaca

SEQ ID NO: 61301 - DNA, 20 bp, synthetic construct
  source 1..20: mol_type = other DNA
gacccttaccgtaagccccc

SEQ ID NO: 61302 - DNA, 20 bp, synthetic construct
  source 1..20: mol_type = other DNA
atacatgccctacctcaaca

SEQ ID NO: 61303 - DNA, 20 bp, synthetic construct
  source 1..20: mol_type = other DNA
tcaacatggccaggatgggc

SEQ ID NO: 61304 - DNA, 20 bp, synthetic construct
  source 1..20: mol_type = other DNA
ggacattctacataccaagg

SEQ ID NO: 61305 - DNA, 20 bp, synthetic construct
  source 1..20: mol_type = other DNA
aggccgaacttctcacagca

SEQ ID NO: 61306 - DNA, 20 bp, synthetic construct
  source 1..20: mol_type = other DNA
gtgaatgtcccgtagttaat

SEQ ID NO: 61307 - DNA, 20 bp, synthetic construct
  source 1..20: mol_type = other DNA
cctgcacagctggttcttca

SEQ ID NO: 61308 - DNA, 20 bp, synthetic construct
  source 1..20: mol_type = other DNA
tgccagacgctgagcccccc

SEQ ID NO: 61309 - DNA, 20 bp, synthetic construct
  source 1..20: mol_type = other DNA
ctccaagtcccagctcaagg

SEQ ID NO: 61310 - DNA, 20 bp, synthetic construct
  source 1..20: mol_type = other DNA
tttgacactggccacaggtg

SEQ ID NO: 61311 - DNA, 20 bp, synthetic construct
  source 1..20: mol_type = other DNA
gcagtgattcataatctggt

SEQ ID NO: 61312 - DNA, 20 bp, synthetic construct
  source 1..20: mol_type = other DNA
ggctgcagctcacacccgga

SEQ ID NO: 61313 - DNA, 20 bp, synthetic construct
  source 1..20: mol_type = other DNA
ccagcagaggctgaccatgt

SEQ ID NO: 61314 - DNA, 20 bp, synthetic construct
  source 1..20: mol_type = other DNA
tggcaggccttccactcccg

SEQ ID NO: 61315 - DNA, 20 bp, synthetic construct
  source 1..20: mol_type = other DNA
gtgcagagcgataaccaggt

SEQ ID NO: 61316 - DNA, 20 bp, synthetic construct
  source 1..20: mol_type = other DNA
tccgcagggtaccggaagct

SEQ ID NO: 61317 - DNA, 20 bp, synthetic construct
  source 1..20: mol_type = other DNA
cagctggaggaggtggagcg

SEQ ID NO: 61318 - DNA, 20 bp, synthetic construct
  source 1..20: mol_type = other DNA
gcttccatgctgtaacgtga

SEQ ID NO: 61319 - DNA, 20 bp, synthetic construct
  source 1..20: mol_type = other DNA
ggatgggttggagctatcca

SEQ ID NO: 61320 - DNA, 20 bp, synthetic construct
  source 1..20: mol_type = other DNA
gtctcttaccattcttggtt

SEQ ID NO: 61321 - DNA, 20 bp, synthetic construct
  source 1..20: mol_type = other DNA
ccctcacctggatgatggac

SEQ ID NO: 61322 - DNA, 20 bp, synthetic construct
  source 1..20: mol_type = other DNA
taataaaggccactgttact

SEQ ID NO: 61323 - DNA, 20 bp, synthetic construct
  source 1..20: mol_type = other DNA
ccgaacttctcacagcaggt

SEQ ID NO: 61324 - DNA, 20 bp, synthetic construct
  source 1..20: mol_type = other DNA
gacagggtgtagatgacctg

SEQ ID NO: 61325 - DNA, 20 bp, synthetic construct
  source 1..20: mol_type = other DNA
tagagatggcacatggctcc

SEQ ID NO: 61326 - DNA, 20 bp, synthetic construct
  source 1..20: mol_type = other DNA
agcacaagaagctggctgag

SEQ ID NO: 61327 - DNA, 20 bp, synthetic construct
  source 1..20: mol_type = other DNA
acgctacaagcatgggcgac

SEQ ID NO: 61328 - DNA, 20 bp, synthetic construct
  source 1..20: mol_type = other DNA
cagcacatagccgcccagcg

SEQ ID NO: 61329 - DNA, 20 bp, synthetic construct
  source 1..20: mol_type = other DNA
ggcgccaggagctgccgctc

SEQ ID NO: 61330 - DNA, 20 bp, synthetic construct
  source 1..20: mol_type = other DNA
aaacacacgcaggaggcgat

SEQ ID NO: 61331 - DNA, 20 bp, synthetic construct
  source 1..20: mol_type = other DNA
acagctggaaattggtgatc

SEQ ID NO: 61332 - DNA, 20 bp, synthetic construct
  source 1..20: mol_type = other DNA
cgaggtcaagcgagacaacg

SEQ ID NO: 61333 - DNA, 20 bp, synthetic construct
  source 1..20: mol_type = other DNA
gcccacctcgaggctgcggc

SEQ ID NO: 61334 - DNA, 20 bp, synthetic construct
  source 1..20: mol_type = other DNA
ccacagaaagtaattaccct

SEQ ID NO: 61335 - DNA, 20 bp, synthetic construct
  source 1..20: mol_type = other DNA
gaaaggtaccccagtgaagg

SEQ ID NO: 61336 - DNA, 20 bp, synthetic construct
  source 1..20: mol_type = other DNA
gctgtgcagagcgataacca

SEQ ID NO: 61337 - DNA, 20 bp, synthetic construct
  source 1..20: mol_type = other DNA
gtcagctcgtcctccctctg

SEQ ID NO: 61338 - DNA, 20 bp, synthetic construct
  source 1..20: mol_type = other DNA
gagatgcgtaatgctgtgga

SEQ ID NO: 61339 - DNA, 20 bp, synthetic construct
  source 1..20: mol_type = other DNA
ctgctggatctcccgcaggc

SEQ ID NO: 61340 - DNA, 20 bp, synthetic construct
  source 1..20: mol_type = other DNA
gaagcaggtcctactcggag

SEQ ID NO: 61341 - DNA, 20 bp, synthetic construct
  source 1..20: mol_type = other DNA
acagcctcatgagttggtac

SEQ ID NO: 61342 - DNA, 20 bp, synthetic construct
  source 1..20: mol_type = other DNA
cccgtagggatgaccaaccc

SEQ ID NO: 61343 - DNA, 20 bp, synthetic construct
  source 1..20: mol_type = other DNA
ggaaggcatcctgattggag

SEQ ID NO: 61344 - DNA, 20 bp, synthetic construct
  source 1..20: mol_type = other DNA
catataggaggtagttgtca

SEQ ID NO: 61345 - DNA, 20 bp, synthetic construct
  source 1..20: mol_type = other DNA
ctcaactcgggaggtgccat

SEQ ID NO: 61346 - DNA, 20 bp, synthetic construct
  source 1..20: mol_type = other DNA
cacgtaccatccagatctaa

SEQ ID NO: 61347 - DNA, 20 bp, synthetic construct
  source 1..20: mol_type = other DNA
tcatccacagagacttggta

SEQ ID NO: 61348 - DNA, 20 bp, synthetic construct
  source 1..20: mol_type = other DNA
ggagtggttttgacttgttc

SEQ ID NO: 61349 - DNA, 20 bp, synthetic construct
  source 1..20: mol_type = other DNA
gtagggatgaccaacccgga

SEQ ID NO: 61350 - DNA, 20 bp, synthetic construct
  source 1..20: mol_type = other DNA
tgagttggtacagctcctct

SEQ ID NO: 61351 - DNA, 20 bp, synthetic construct
  source 1..20: mol_type = other DNA
ttcaccatctgcaagtcagg

SEQ ID NO: 61352 - DNA, 20 bp, synthetic construct
  source 1..20: mol_type = other DNA
ctacaagtgagtgccagtgg

SEQ ID NO: 61353 - DNA, 20 bp, synthetic construct
  source 1..20: mol_type = other DNA
gctcaggcacaggcagcctc

SEQ ID NO: 61354 - DNA, 20 bp, synthetic construct
  source 1..20: mol_type = other DNA
gtatccctggctggacacag

SEQ ID NO: 61355 - DNA, 20 bp, synthetic construct
  source 1..20: mol_type = other DNA
ggtgtactgatcatccagaa

SEQ ID NO: 61356 - DNA, 20 bp, synthetic construct
  source 1..20: mol_type = other DNA
agatgaagaggattccatcc

SEQ ID NO: 61357 - DNA, 20 bp, synthetic construct
  source 1..20: mol_type = other DNA
ggggcagcagctttctggga

SEQ ID NO: 61358 - DNA, 20 bp, synthetic construct
  source 1..20: mol_type = other DNA
atgacaccagtaggttcctt

SEQ ID NO: 61359 - DNA, 20 bp, synthetic construct
  source 1..20: mol_type = other DNA
taccagggcatccgctcgtg

SEQ ID NO: 61360 - DNA, 20 bp, synthetic construct
  source 1..20: mol_type = other DNA
ccaggaactgccagacgctg

SEQ ID NO: 61361 - DNA, 20 bp, synthetic construct
  source 1..20: mol_type = other DNA
ggccagcacccagcgctgcc

SEQ ID NO: 61362 - DNA, 20 bp, synthetic construct
  source 1..20: mol_type = other DNA
ctgcttcaggacatcttgga

SEQ ID NO: 61363 - DNA, 20 bp, synthetic construct
  source 1..20: mol_type = other DNA
ccagttcgtcagcaggtccg

SEQ ID NO: 61364 - DNA, 20 bp, synthetic construct
  source 1..20: mol_type = other DNA
tgaagtgcttaatgccccta

SEQ ID NO: 61365 - DNA, 20 bp, synthetic construct
  source 1..20: mol_type = other DNA
gcaggcgctcagcgatgtga

SEQ ID NO: 61366 - DNA, 20 bp, synthetic construct
  source 1..20: mol_type = other DNA
agggaagtggccgctcaagt

SEQ ID NO: 61367 - DNA, 20 bp, synthetic construct
  source 1..20: mol_type = other DNA
aaccaggatgtcccccaagg

SEQ ID NO: 61368 - DNA, 20 bp, synthetic construct
  source 1..20: mol_type = other DNA
caccccagggaggagatccc

SEQ ID NO: 61369 - DNA, 20 bp, synthetic construct
  source 1..20: mol_type = other DNA
ccgcaggtacccagtcatcc

SEQ ID NO: 61370 - DNA, 20 bp, synthetic construct
  source 1..20: mol_type = other DNA
tttgttaaagagcactttga

SEQ ID NO: 61371 - DNA, 20 bp, synthetic construct
  source 1..20: mol_type = other DNA
aacaggatctacaacctgca

SEQ ID NO: 61372 - DNA, 20 bp, synthetic construct
  source 1..20: mol_type = other DNA
agcacgcaggggaccaggat

SEQ ID NO: 61373 - DNA, 20 bp, synthetic construct
  source 1..20: mol_type = other DNA
atctccaggcatgaggatga

SEQ ID NO: 61374 - DNA, 20 bp, synthetic construct
  source 1..20: mol_type = other DNA
ccactcacctggcagtctgt

SEQ ID NO: 61375 - DNA, 20 bp, synthetic construct
  source 1..20: mol_type = other DNA
cggagccacctggagagaga

SEQ ID NO: 61376 - DNA, 20 bp, synthetic construct
  source 1..20: mol_type = other DNA
ccgaatagattcaacaaggg

SEQ ID NO: 61377 - DNA, 20 bp, synthetic construct
  source 1..20: mol_type = other DNA
gcaggcctccttcaggcagt

SEQ ID NO: 61378 - DNA, 20 bp, synthetic construct
  source 1..20: mol_type = other DNA
aggagatgaaggaagccctg

SEQ ID NO: 61379 - DNA, 20 bp, synthetic construct
  source 1..20: mol_type = other DNA
gacgaactggaggagaagag

SEQ ID NO: 61380 - DNA, 20 bp, synthetic construct
  source 1..20: mol_type = other DNA
tggaggagactggcggagct

SEQ ID NO: 61381 - DNA, 20 bp, synthetic construct
  source 1..20: mol_type = other DNA
aggaagatctgcttctgtct

SEQ ID NO: 61382 - DNA, 20 bp, synthetic construct
  source 1..20: mol_type = other DNA
catgatccccctgttctggg

SEQ ID NO: 61383 - DNA, 20 bp, synthetic construct
  source 1..20: mol_type = other DNA
tcgggcaggaagcagatcga

SEQ ID NO: 61384 - DNA, 20 bp, synthetic construct
  source 1..20: mol_type = other DNA
ctcaaggtgaggggcacccg

SEQ ID NO: 61385 - DNA, 20 bp, synthetic construct
  source 1..20: mol_type = other DNA
acaagaagctggctgagggc

SEQ ID NO: 61386 - DNA, 20 bp, synthetic construct
  source 1..20: mol_type = other DNA
cttgatgagctgttcttcca

SEQ ID NO: 61387 - DNA, 20 bp, synthetic construct
  source 1..20: mol_type = other DNA
gagtagaacaaagtcatgac

SEQ ID NO: 61388 - DNA, 20 bp, synthetic construct
  source 1..20: mol_type = other DNA
cgcagcaggaagagcccgtc

SEQ ID NO: 61389 - DNA, 20 bp, synthetic construct
  source 1..20: mol_type = other DNA
ccggatgaagagcacgatgg

SEQ ID NO: 61390 - DNA, 20 bp, synthetic construct
  source 1..20: mol_type = other DNA
tgcagctggaaccagcgttc

SEQ ID NO: 61391 - DNA, 20 bp, synthetic construct
  source 1..20: mol_type = other DNA
catacagcgcccgggcccac

SEQ ID NO: 61392 - DNA, 20 bp, synthetic construct
  source 1..20: mol_type = other DNA
cctccagcttccacgtctgg

SEQ ID NO: 61393 - DNA, 20 bp, synthetic construct
  source 1..20: mol_type = other DNA
cggtacacgccctggcgcac

SEQ ID NO: 61394 - DNA, 20 bp, synthetic construct
  source 1..20: mol_type = other DNA
gccagttgacgcagcagtct

SEQ ID NO: 61395 - DNA, 20 bp, synthetic construct
  source 1..20: mol_type = other DNA
gcgcgcacgcgtagttgcac

SEQ ID NO: 61396 - DNA, 20 bp, synthetic construct
  source 1..20: mol_type = other DNA
gccgccacactgcttccttt

SEQ ID NO: 61397 - DNA, 20 bp, synthetic construct
  source 1..20: mol_type = other DNA
tttagggatggaaacttctc

SEQ ID NO: 61398 - DNA, 20 bp, synthetic construct
  source 1..20: mol_type = other DNA
cccggcagactgctggaaga

SEQ ID NO: 61399 - DNA, 20 bp, synthetic construct
  source 1..20: mol_type = other DNA
gatgaagaggacgccttgtg

SEQ ID NO: 61400 - DNA, 20 bp, synthetic construct
  source 1..20: mol_type = other DNA
gttggatcttactgaatatg

SEQ ID NO: 61401 - DNA, 20 bp, synthetic construct
  source 1..20: mol_type = other DNA
agtgcttaatgcccctatgc

SEQ ID NO: 61402 - DNA, 20 bp, synthetic construct
  source 1..20: mol_type = other DNA
ggcacccagtgctttggaga

SEQ ID NO: 61403 - DNA, 20 bp, synthetic construct
  source 1..20: mol_type = other DNA
gctggccaagacgctggtgc

SEQ ID NO: 61404 - DNA, 20 bp, synthetic construct
  source 1..20: mol_type = other DNA
agggccatggctgaggcgcc

SEQ ID NO: 61405 - DNA, 20 bp, synthetic construct
  source 1..20: mol_type = other DNA
tcataccaagtctctgtgga

SEQ ID NO: 61406 - DNA, 20 bp, synthetic construct
  source 1..20: mol_type = other DNA
cgaactgtccagcccccagc

SEQ ID NO: 61407 - DNA, 20 bp, synthetic construct
  source 1..20: mol_type = other DNA
ggaaggttagcagctccacg

SEQ ID NO: 61408 - DNA, 20 bp, synthetic construct
  source 1..20: mol_type = other DNA
gtcctggaccccgatcgccc

SEQ ID NO: 61409 - DNA, 20 bp, synthetic construct
  source 1..20: mol_type = other DNA
ctgacttacgttatagagct

SEQ ID NO: 61410 - DNA, 20 bp, synthetic construct
  source 1..20: mol_type = other DNA
ctacctgctggcctgctgat

SEQ ID NO: 61411 - DNA, 20 bp, synthetic construct
  source 1..20: mol_type = other DNA
gaagagcacgatggggtaga

SEQ ID NO: 61412 - DNA, 20 bp, synthetic construct
  source 1..20: mol_type = other DNA
tgcaggacctggagcagcgc

SEQ ID NO: 61413 - DNA, 20 bp, synthetic construct
  source 1..20: mol_type = other DNA
gcagaggtgcagcacctcgg

SEQ ID NO: 61414 - DNA, 20 bp, synthetic construct
  source 1..20: mol_type = other DNA
cagtgaactgagtctggtat

SEQ ID NO: 61415 - DNA, 20 bp, synthetic construct
  source 1..20: mol_type = other DNA
cccagctcgtcatcctccag

SEQ ID NO: 61416 - DNA, 20 bp, synthetic construct
  source 1..20: mol_type = other DNA
tttcagcaggtattccacct

SEQ ID NO: 61417 - DNA, 20 bp, synthetic construct
  source 1..20: mol_type = other DNA
tgacaggcagccgtgctcca

SEQ ID NO: 61418 - DNA, 20 bp, synthetic construct
  source 1..20: mol_type = other DNA
ctcacccatccacacctccc

SEQ ID NO: 61419 - DNA, 20 bp, synthetic construct
  source 1..20: mol_type = other DNA
gatgaggaaggagccgtgag

SEQ ID NO: 61420 - DNA, 20 bp, synthetic construct
  source 1..20: mol_type = other DNA
agaggagcaggctcctgcac

SEQ ID NO: 61421 - DNA, 20 bp, synthetic construct
  source 1..20: mol_type = other DNA
catggtgaccccatagctcc

SEQ ID NO: 61422 - DNA, 20 bp, synthetic construct
  source 1..20: mol_type = other DNA
cactcaccctgttgtcttca

SEQ ID NO: 61423 - DNA, 20 bp, synthetic construct
  source 1..20: mol_type = other DNA
agatactccaccagctgcag

SEQ ID NO: 61424 - DNA, 20 bp, synthetic construct
  source 1..20: mol_type = other DNA
gccacctgtgggagccacag

SEQ ID NO: 61425 - DNA, 20 bp, synthetic construct
  source 1..20: mol_type = other DNA
gtccacttaatgggaaactt

SEQ ID NO: 61426 - DNA, 20 bp, synthetic construct
  source 1..20: mol_type = other DNA
ggtagcagagtttgggatcc

SEQ ID NO: 61427 - DNA, 20 bp, synthetic construct
  source 1..20: mol_type = other DNA
tcttctacggcagcatctcg

SEQ ID NO: 61428 - DNA, 20 bp, synthetic construct
  source 1..20: mol_type = other DNA
gatgagaagagggatggaat

SEQ ID NO: 61429 - DNA, 20 bp, synthetic construct
  source 1..20: mol_type = other DNA
gcaggtccttggccttcatc

SEQ ID NO: 61430 - DNA, 20 bp, synthetic construct
  source 1..20: mol_type = other DNA
ggaccatgggctgtggctgc

SEQ ID NO: 61431 - DNA, 20 bp, synthetic construct
  source 1..20: mol_type = other DNA
catgaccccgtggccctgga

SEQ ID NO: 61432 - DNA, 20 bp, synthetic construct
  source 1..20: mol_type = other DNA
atacctggtggaaatggtgg

SEQ ID NO: 61433 - DNA, 20 bp, synthetic construct
  source 1..20: mol_type = other DNA
gccacaggtgagcaggtcag

SEQ ID NO: 61434 - DNA, 20 bp, synthetic construct
  source 1..20: mol_type = other DNA
gatgtgcaggaccgtgtaca

SEQ ID NO: 61435 - DNA, 20 bp, synthetic construct
  source 1..20: mol_type = other DNA
ccagcttcttgtgctgtagg

SEQ ID NO: 61436 - DNA, 20 bp, synthetic construct
  source 1..20: mol_type = other DNA
ggtccaccaggatgggttgg

SEQ ID NO: 61437 - DNA, 20 bp, synthetic construct
  source 1..20: mol_type = other DNA
ggagaacttgcggaagttga

SEQ ID NO: 61438 - DNA, 20 bp, synthetic construct
  source 1..20: mol_type = other DNA
tccttgaaggggaactgcaa

SEQ ID NO: 61439 - DNA, 20 bp, synthetic construct
  source 1..20: mol_type = other DNA
ctgggacaagtgctgcgggt

SEQ ID NO: 61440 - DNA, 20 bp, synthetic construct
  source 1..20: mol_type = other DNA
ggtgcatgatctgcgcctcg

SEQ ID NO: 61441 - DNA, 20 bp, synthetic construct
  source 1..20: mol_type = other DNA
ccagatgttctcctttgagg

SEQ ID NO: 61442 - DNA, 20 bp, synthetic construct
  source 1..20: mol_type = other DNA
caggttgacctcacgcaggt

SEQ ID NO: 61443 - DNA, 20 bp, synthetic construct
  source 1..20: mol_type = other DNA
ggtcgagcacttgagctcca

SEQ ID NO: 61444 - DNA, 20 bp, synthetic construct
  source 1..20: mol_type = other DNA
cccatacccctgccgcctgg

SEQ ID NO: 61445 - DNA, 20 bp, synthetic construct
  source 1..20: mol_type = other DNA
tctggcaggtaggctgcccg

SEQ ID NO: 61446 - DNA, 20 bp, synthetic construct
  source 1..20: mol_type = other DNA
cccacatcagcacacctaca

SEQ ID NO: 61447 - DNA, 20 bp, synthetic construct
  source 1..20: mol_type = other DNA
aagcggatggagtgcccacc

SEQ ID NO: 61448 - DNA, 20 bp, synthetic construct
  source 1..20: mol_type = other DNA
ggccaactccaggtcctcac

SEQ ID NO: 61449 - DNA, 20 bp, synthetic construct
  source 1..20: mol_type = other DNA
atccagtcgctggcccttgg

SEQ ID NO: 61450 - DNA, 20 bp, synthetic construct
  source 1..20: mol_type = other DNA
tagggcatgtatccctggct

SEQ ID NO: 61451 - DNA, 20 bp, synthetic construct
  source 1..20: mol_type = other DNA
ctcacacacatccagacaca

SEQ ID NO: 61452 - DNA, 20 bp, synthetic construct
  source 1..20: mol_type = other DNA
cacagcccatggtccctgag

SEQ ID NO: 61453 - DNA, 20 bp, synthetic construct
  source 1..20: mol_type = other DNA
ttggtacagctcctctggac

SEQ ID NO: 61454 - DNA, 20 bp, synthetic construct
  source 1..20: mol_type = other DNA
ccctacctgcgtcagtgtaa

SEQ ID NO: 61455 - DNA, 20 bp, synthetic construct
  source 1..20: mol_type = other DNA
atgaagagagtaagggccag

SEQ ID NO: 61456 - DNA, 20 bp, synthetic construct
  source 1..20: mol_type = other DNA
ccactagactccctgtgggc

SEQ ID NO: 61457 - DNA, 20 bp, synthetic construct
  source 1..20: mol_type = other DNA
tatcaaccctgccaagctca

SEQ ID NO: 61458 - DNA, 20 bp, synthetic construct
  source 1..20: mol_type = other DNA
gccaaggacctgcaacgctg

SEQ ID NO: 61459 - DNA, 20 bp, synthetic construct
  source 1..20: mol_type = other DNA
gctcacctcaatgttgataa

SEQ ID NO: 61460 - DNA, 20 bp, synthetic construct
  source 1..20: mol_type = other DNA
gaggaggttatcgcgcttca

SEQ ID NO: 61461 - DNA, 20 bp, synthetic construct
  source 1..20: mol_type = other DNA
caggatgtcccccaagggga

SEQ ID NO: 61462 - DNA, 20 bp, synthetic construct
  source 1..20: mol_type = other DNA
caggaaaacccaaaaggtct

SEQ ID NO: 61463 - DNA, 20 bp, synthetic construct
  source 1..20: mol_type = other DNA
gttgcagggcagcccgtcgg

SEQ ID NO: 61464 - DNA, 20 bp, synthetic construct
  source 1..20: mol_type = other DNA
cggcagaggtgcagcacctc

SEQ ID NO: 61465 - DNA, 20 bp, synthetic construct
  source 1..20: mol_type = other DNA
cccactgtagattccgcaca

SEQ ID NO: 61466 - DNA, 20 bp, synthetic construct
  source 1..20: mol_type = other DNA
ccccacatgtcaggttccac

SEQ ID NO: 61467 - DNA, 20 bp, synthetic construct
  source 1..20: mol_type = other DNA
ccagcagtgattcataatct

SEQ ID NO: 61468 - DNA, 20 bp, synthetic construct
  source 1..20: mol_type = other DNA
agggtacttgtcctcagaca

SEQ ID NO: 61469 - DNA, 20 bp, synthetic construct
  source 1..20: mol_type = other DNA
ctccagggcctccttgcggt

SEQ ID NO: 61470 - DNA, 20 bp, synthetic construct
  source 1..20: mol_type = other DNA
gtagggcgtgagcttggcag

SEQ ID NO: 61471 - DNA, 20 bp, synthetic construct
  source 1..20: mol_type = other DNA
gaccacacatctgacttgat

SEQ ID NO: 61472 - DNA, 20 bp, synthetic construct
  source 1..20: mol_type = other DNA
gtctccagcttgacctggaa

SEQ ID NO: 61473 - DNA, 20 bp, synthetic construct
  source 1..20: mol_type = other DNA
atacagaagattacagatga

SEQ ID NO: 61474 - DNA, 20 bp, synthetic construct
  source 1..20: mol_type = other DNA
cacccttaccaccaagatca

SEQ ID NO: 61475 - DNA, 20 bp, synthetic construct
  source 1..20: mol_type = other DNA
ggtgatctgtcgcagtgtct

SEQ ID NO: 61476 - DNA, 20 bp, synthetic construct
  source 1..20: mol_type = other DNA
ctatgtagaggcaaacccta

SEQ ID NO: 61477 - DNA, 20 bp, synthetic construct
  source 1..20: mol_type = other DNA
gcagctaaggttgaccgcat

SEQ ID NO: 61478 - DNA, 20 bp, synthetic construct
  source 1..20: mol_type = other DNA
tgtcaggtactgaccattcc

SEQ ID NO: 61479 - DNA, 20 bp, synthetic construct
  source 1..20: mol_type = other DNA
tgggacagcacctgggatag

SEQ ID NO: 61480 - DNA, 20 bp, synthetic construct
  source 1..20: mol_type = other DNA
aaggacgacaactacaactt

SEQ ID NO: 61481 - DNA, 20 bp, synthetic construct
  source 1..20: mol_type = other DNA
ccaggtctgcccaagatgga

SEQ ID NO: 61482 - DNA, 20 bp, synthetic construct
  source 1..20: mol_type = other DNA
caggaaggcgtccggggaca

SEQ ID NO: 61483 - DNA, 20 bp, synthetic construct
  source 1..20: mol_type = other DNA
gatggagaagtcccctgggg

SEQ ID NO: 61484 - DNA, 20 bp, synthetic construct
  source 1..20: mol_type = other DNA
cttgaccagctcgtcattgt

SEQ ID NO: 61485 - DNA, 20 bp, synthetic construct
  source 1..20: mol_type = other DNA
tgtgtactcgttgtcctcaa

SEQ ID NO: 61486 - DNA, 20 bp, synthetic construct
  source 1..20: mol_type = other DNA
tgacctcgttcatcaggaag

SEQ ID NO: 61487 - DNA, 20 bp, synthetic construct
  source 1..20: mol_type = other DNA
gcacccaaaagggcttagaa

SEQ ID NO: 61488 - DNA, 20 bp, synthetic construct
  source 1..20: mol_type = other DNA
ggggacatcctggtttttat

SEQ ID NO: 61489 - DNA, 20 bp, synthetic construct
  source 1..20: mol_type = other DNA
ccgcaacctggccagcagct

SEQ ID NO: 61490 - DNA, 20 bp, synthetic construct
  source 1..20: mol_type = other DNA
ctcacgaggccgtttgaact

SEQ ID NO: 61491 - DNA, 20 bp, synthetic construct
  source 1..20: mol_type = other DNA
gcactgcctgctggaggctg

SEQ ID NO: 61492 - DNA, 20 bp, synthetic construct
  source 1..20: mol_type = other DNA
cacgcaccggcatggacacg

SEQ ID NO: 61493 - DNA, 20 bp, synthetic construct
  source 1..20: mol_type = other DNA
cctgatagaaggtacctctg

SEQ ID NO: 61494 - DNA, 20 bp, synthetic construct
  source 1..20: mol_type = other DNA
gggctcactggtgtaatggc

SEQ ID NO: 61495 - DNA, 20 bp, synthetic construct
  source 1..20: mol_type = other DNA
aagcgcaggggagactccta

SEQ ID NO: 61496 - DNA, 20 bp, synthetic construct
  source 1..20: mol_type = other DNA
gttgaagaggcaccagaggc

SEQ ID NO: 61497 - DNA, 20 bp, synthetic construct
  source 1..20: mol_type = other DNA
cccaggaaacaagattttgg

SEQ ID NO: 61498 - DNA, 20 bp, synthetic construct
  source 1..20: mol_type = other DNA
ctcctgcaggttgtagatcc

SEQ ID NO: 61499 - DNA, 20 bp, synthetic construct
  source 1..20: mol_type = other DNA
cggatgaggaaggagccgtg

SEQ ID NO: 61500 - DNA, 20 bp, synthetic construct
  source 1..20: mol_type = other DNA
cctacccggagtgcccgcag

SEQ ID NO: 61501 - DNA, 20 bp, synthetic construct
  source 1..20: mol_type = other DNA
tcagtaagtgctctcttctc

SEQ ID NO: 61502 - DNA, 20 bp, synthetic construct
  source 1..20: mol_type = other DNA
tgcagggctggggagcggcc

SEQ ID NO: 61503 - DNA, 20 bp, synthetic construct
  source 1..20: mol_type = other DNA
aggcggaaggcatcctgatt

SEQ ID NO: 61504 - DNA, 20 bp, synthetic construct
  source 1..20: mol_type = other DNA
gaccaggtacaggcaccacc

SEQ ID NO: 61505 - DNA, 20 bp, synthetic construct
  source 1..20: mol_type = other DNA
ctcacctccacgcagcagtg

SEQ ID NO: 61506 - DNA, 20 bp, synthetic construct
  source 1..20: mol_type = other DNA
gtctccaagtcccagctcaa

SEQ ID NO: 61507 - DNA, 20 bp, synthetic construct
  source 1..20: mol_type = other DNA
gtccactcctggcgctggcg

SEQ ID NO: 61508 - DNA, 20 bp, synthetic construct
  source 1..20: mol_type = other DNA
ccacggtcaggaagtcgggg

SEQ ID NO: 61509 - DNA, 20 bp, synthetic construct
  source 1..20: mol_type = other DNA
ctggatctcccgcaggcagc

SEQ ID NO: 61510 - DNA, 20 bp, synthetic construct
  source 1..20: mol_type = other DNA
tgggaaagagggttgttcat

SEQ ID NO: 61511 - DNA, 20 bp, synthetic construct
  source 1..20: mol_type = other DNA
atccgcaggcagcgagcata

SEQ ID NO: 61512 - DNA, 20 bp, synthetic construct
  source 1..20: mol_type = other DNA
ccaggtactgtgaaccacac

SEQ ID NO: 61513 - DNA, 20 bp, synthetic construct
  source 1..20: mol_type = other DNA
tgccagagcgtgtcaaactt

SEQ ID NO: 61514 - DNA, 20 bp, synthetic construct
  source 1..20: mol_type = other DNA
ggggaagttcatttgacact

SEQ ID NO: 61515 - DNA, 20 bp, synthetic construct
  source 1..20: mol_type = other DNA
ctgcgtcagtgtaaggtcat

SEQ ID NO: 61516 - DNA, 20 bp, synthetic construct
  source 1..20: mol_type = other DNA
gagcatacctggtcttctcg

SEQ ID NO: 61517 - DNA, 20 bp, synthetic construct
  source 1..20: mol_type = other DNA
ggacatcctggtttttatag

SEQ ID NO: 61518 - DNA, 20 bp, synthetic construct
  source 1..20: mol_type = other DNA
ttcaggtgctcctcggcctc

SEQ ID NO: 61519 - DNA, 20 bp, synthetic construct
  source 1..20: mol_type = other DNA
gcagtggtcctcaatggaca

SEQ ID NO: 61520 - DNA, 20 bp, synthetic construct
  source 1..20: mol_type = other DNA
ctggtaccacagcagcctga

SEQ ID NO: 61521 - DNA, 20 bp, synthetic construct
  source 1..20: mol_type = other DNA
ccagcacagcctcatgagtt

SEQ ID NO: 61522 - DNA, 20 bp, synthetic construct
  source 1..20: mol_type = other DNA
cttgaggccgaacttctcac

SEQ ID NO: 61523 - DNA, 20 bp, synthetic construct
  source 1..20: mol_type = other DNA
tcggaggaagcgcatgttgg

SEQ ID NO: 61524 - DNA, 20 bp, synthetic construct
  source 1..20: mol_type = other DNA
tgcaggcggccggtccacca

SEQ ID NO: 61525 - DNA, 20 bp, synthetic construct
  source 1..20: mol_type = other DNA
atgaccagcatgagggcctc

SEQ ID NO: 61526 - DNA, 20 bp, synthetic construct
  source 1..20: mol_type = other DNA
gctccactgcagggaagcag

SEQ ID NO: 61527 - DNA, 20 bp, synthetic construct
  source 1..20: mol_type = other DNA
caaggtggtgtccagagact

SEQ ID NO: 61528 - DNA, 20 bp, synthetic construct
  source 1..20: mol_type = other DNA
ctccaggaactgccagacgc

SEQ ID NO: 61529 - DNA, 20 bp, synthetic construct
  source 1..20: mol_type = other DNA
ctggaggagaaggaggacct

SEQ ID NO: 61530 - DNA, 20 bp, synthetic construct
  source 1..20: mol_type = other DNA
gcgcttcaggaagagcttct

SEQ ID NO: 61531 - DNA, 20 bp, synthetic construct
  source 1..20: mol_type = other DNA
gtgctctataaaaaccagga

SEQ ID NO: 61532 - DNA, 20 bp, synthetic construct
  source 1..20: mol_type = other DNA
tgttccaagatgtccaggat

SEQ ID NO: 61533 - DNA, 20 bp, synthetic construct
  source 1..20: mol_type = other DNA
cagattggtgagctcccatc

SEQ ID NO: 61534 - DNA, 20 bp, synthetic construct
  source 1..20: mol_type = other DNA
tgaagggaagataatggaac

SEQ ID NO: 61535 - DNA, 20 bp, synthetic construct
  source 1..20: mol_type = other DNA
cgtccagcacagctcatcaa

SEQ ID NO: 61536 - DNA, 20 bp, synthetic construct
  source 1..20: mol_type = other DNA
cagccacagcccatggtccc

SEQ ID NO: 61537 - DNA, 20 bp, synthetic construct
  source 1..20: mol_type = other DNA
cgtgacctggcggcccgcaa

SEQ ID NO: 61538 - DNA, 20 bp, synthetic construct
  source 1..20: mol_type = other DNA
ctcaaaggagaacatctgga

SEQ ID NO: 61539 - DNA, 20 bp, synthetic construct
  source 1..20: mol_type = other DNA
caggtattccacctggagca

SEQ ID NO: 61540 - DNA, 20 bp, synthetic construct
  source 1..20: mol_type = other DNA
tccagcacagctcatcaaag

SEQ ID NO: 61541 - DNA, 20 bp, synthetic construct
  source 1..20: mol_type = other DNA
ccccgaactgtccagccccc

SEQ ID NO: 61542 - DNA, 20 bp, synthetic construct
  source 1..20: mol_type = other DNA
cctggaaggtcttccgctcg

SEQ ID NO: 61543 - DNA, 20 bp, synthetic construct
  source 1..20: mol_type = other DNA
gagctgcagtccatcatcca

SEQ ID NO: 61544 - DNA, 20 bp, synthetic construct
  source 1..20: mol_type = other DNA
gatggacttgagcagttcct

SEQ ID NO: 61545 - DNA, 20 bp, synthetic construct
  source 1..20: mol_type = other DNA
tccgtcagcaggatcccaaa

SEQ ID NO: 61546 - DNA, 20 bp, synthetic construct
  source 1..20: mol_type = other DNA
ccagcgccggaggggcaagg

SEQ ID NO: 61547 - DNA, 20 bp, synthetic construct
  source 1..20: mol_type = other DNA
ggagaagaacatggcggtca

SEQ ID NO: 61548 - DNA, 20 bp, synthetic construct
  source 1..20: mol_type = other DNA
aagaggcaccagaggcggaa

SEQ ID NO: 61549 - DNA, 20 bp, synthetic construct
  source 1..20: mol_type = other DNA
ggtcataggagtctcccctg

SEQ ID NO: 61550 - DNA, 20 bp, synthetic construct
  source 1..20: mol_type = other DNA
tgaaggccaaggacctgcaa

SEQ ID NO: 61551 - DNA, 20 bp, synthetic construct
  source 1..20: mol_type = other DNA
ctccacggtcaggaagtcgg

SEQ ID NO: 61552 - DNA, 20 bp, synthetic construct
  source 1..20: mol_type = other DNA
cctcaaggactttgtaaacc

SEQ ID NO: 61553 - DNA, 20 bp, synthetic construct
  source 1..20: mol_type = other DNA
gggtaagggatgcggccgtg

SEQ ID NO: 61554 - DNA, 20 bp, synthetic construct
  source 1..20: mol_type = other DNA
gggctggaggagactggcgg

SEQ ID NO: 61555 - DNA, 20 bp, synthetic construct
  source 1..20: mol_type = other DNA
gcccctcacctccacgcagc

SEQ ID NO: 61556 - DNA, 20 bp, synthetic construct
  source 1..20: mol_type = other DNA
taccccaagggccagcgact

SEQ ID NO: 61557 - DNA, 20 bp, synthetic construct
  source 1..20: mol_type = other DNA
cccagccaccgcgtgacctg

SEQ ID NO: 61558 - DNA, 20 bp, synthetic construct
  source 1..20: mol_type = other DNA
actcactctgaggccacaaa

SEQ ID NO: 61559 - DNA, 20 bp, synthetic construct
  source 1..20: mol_type = other DNA
agggaagaggcccagcttgt

SEQ ID NO: 61560 - DNA, 20 bp, synthetic construct
  source 1..20: mol_type = other DNA
tcagtacctgacagagatgg

SEQ ID NO: 61561 - DNA, 20 bp, synthetic construct
  source 1..20: mol_type = other DNA
tctgtcaagaagaacttggg

SEQ ID NO: 61562 - DNA, 20 bp, synthetic construct
  source 1..20: mol_type = other DNA
tcatgagtgcgtacagttcg

SEQ ID NO: 61563 - DNA, 20 bp, synthetic construct
  source 1..20: mol_type = other DNA
ctgggaaagagcccactcgg

SEQ ID NO: 61564 - DNA, 20 bp, synthetic construct
  source 1..20: mol_type = other DNA
ataatataataaccctgaaa

SEQ ID NO: 61565 - DNA, 20 bp, synthetic construct
  source 1..20: mol_type = other DNA
tcagacaccagaatgttggc

SEQ ID NO: 61566 - DNA, 20 bp, synthetic construct
  source 1..20: mol_type = other DNA
cctggcaggccttccactcc

SEQ ID NO: 61567 - DNA, 20 bp, synthetic construct
  source 1..20: mol_type = other DNA
ctccacattctcccacaagg

SEQ ID NO: 61568 - DNA, 20 bp, synthetic construct
  source 1..20: mol_type = other DNA
aattactcccagcagcttca

SEQ ID NO: 61569 - DNA, 20 bp, synthetic construct
  source 1..20: mol_type = other DNA
gccacccacctgcgatgggg

SEQ ID NO: 61570 - DNA, 20 bp, synthetic construct
  source 1..20: mol_type = other DNA
gcaagtactgcattcccgag

SEQ ID NO: 61571 - DNA, 20 bp, synthetic construct
  source 1..20: mol_type = other DNA
ttccacaggcggaacgggaa

SEQ ID NO: 61572 - DNA, 20 bp, synthetic construct
  source 1..20: mol_type = other DNA
agcgactttggcctctccaa

SEQ ID NO: 61573 - DNA, 20 bp, synthetic construct
  source 1..20: mol_type = other DNA
aggggctatgtggtcttctt

SEQ ID NO: 61574 - DNA, 20 bp, synthetic construct
  source 1..20: mol_type = other DNA
agagctgcagtcgattgtac

SEQ ID NO: 61575 - DNA, 20 bp, synthetic construct
  source 1..20: mol_type = other DNA
caagaagtcgcagcgacccg

SEQ ID NO: 61576 - DNA, 20 bp, synthetic construct
  source 1..20: mol_type = other DNA
ggcaaaggatcgtagttgga

SEQ ID NO: 61577 - DNA, 20 bp, synthetic construct
  source 1..20: mol_type = other DNA
gtcattgatgagcaggatga

SEQ ID NO: 61578 - DNA, 20 bp, synthetic construct
  source 1..20: mol_type = other DNA
catgagtaagttctctgcct

SEQ ID NO: 61579 - DNA, 20 bp, synthetic construct
  source 1..20: mol_type = other DNA
ccgcaaacagggcaacccgc

SEQ ID NO: 61580 - DNA, 20 bp, synthetic construct
  source 1..20: mol_type = other DNA
ctccaccacctccccgctgt

SEQ ID NO: 61581 - DNA, 20 bp, synthetic construct
  source 1..20: mol_type = other DNA
ccggtccaccaggatgggtt

SEQ ID NO: 61582 - DNA, 20 bp, synthetic construct
  source 1..20: mol_type = other DNA
cttctgcaggaactgcagaa

SEQ ID NO: 61583 - DNA, 20 bp, synthetic construct
  source 1..20: mol_type = other DNA
gtctgaggacaagtaccctc

SEQ ID NO: 61584 - DNA, 20 bp, synthetic construct
  source 1..20: mol_type = other DNA
cggagccgttgtcgacgacg

SEQ ID NO: 61585 - DNA, 20 bp, synthetic construct
  source 1..20: mol_type = other DNA
cattctcactgccttgttcc

SEQ ID NO: 61586 - DNA, 20 bp, synthetic construct
  source 1..20: mol_type = other DNA
cttgtccaggatgtacttgt

SEQ ID NO: 61587 - DNA, 20 bp, synthetic construct
  source 1..20: mol_type = other DNA
agaggtcaaaggcttcgaag

SEQ ID NO: 61588 - DNA, 20 bp, synthetic construct
  source 1..20: mol_type = other DNA
tattcttagggccctcctca

SEQ ID NO: 61589 - DNA, 20 bp, synthetic construct
  source 1..20: mol_type = other DNA
ggcactggcgcagcaggaag

SEQ ID NO: 61590 - DNA, 20 bp, synthetic construct
  source 1..20: mol_type = other DNA
aaatatcacctccttctcca

SEQ ID NO: 61591 - DNA, 20 bp, synthetic construct
  source 1..20: mol_type = other DNA
gagtgactgctggatctaca

SEQ ID NO: 61592 - DNA, 20 bp, synthetic construct
  source 1..20: mol_type = other DNA
tccttccaggtatgccttcc

SEQ ID NO: 61593 - DNA, 20 bp, synthetic construct
  source 1..20: mol_type = other DNA
ctcagacaggaagttgaaga

SEQ ID NO: 61594 - DNA, 20 bp, synthetic construct
  source 1..20: mol_type = other DNA
tcagccatggccctgcgcaa

SEQ ID NO: 61595 - DNA, 20 bp, synthetic construct
  source 1..20: mol_type = other DNA
ccgcaggcagcagcagcgct

SEQ ID NO: 61596 - DNA, 20 bp, synthetic construct
  source 1..20: mol_type = other DNA
ttccaggttggctggttccc

SEQ ID NO: 61597 - DNA, 20 bp, synthetic construct
  source 1..20: mol_type = other DNA
accctgacctgctcacctgt

SEQ ID NO: 61598 - DNA, 20 bp, synthetic construct
  source 1..20: mol_type = other DNA
tcacagtacctggaggagaa

SEQ ID NO: 61599 - DNA, 20 bp, synthetic construct
  source 1..20: mol_type = other DNA
agcacaaaaggaagcagtgt

SEQ ID NO: 61600 - DNA, 20 bp, synthetic construct
  source 1..20: mol_type = other DNA
cacgtccagcgcggtaaagg

SEQ ID NO: 61601 - DNA, 20 bp, synthetic construct
  source 1..20: mol_type = other DNA
gtacctgacagagatggaga

SEQ ID NO: 61602 - DNA, 20 bp, synthetic construct
  source 1..20: mol_type = other DNA
aatgagccgcacgatgtagg

SEQ ID NO: 61603 - DNA, 20 bp, synthetic construct
  source 1..20: mol_type = other DNA
ggtcagtacctgacagagat

SEQ ID NO: 61604 - DNA, 20 bp, synthetic construct
  source 1..20: mol_type = other DNA
cctcacctcatcaggaacca

SEQ ID NO: 61605 - DNA, 20 bp, synthetic construct
  source 1..20: mol_type = other DNA
ccccccaggcccttccccac

SEQ ID NO: 61606 - DNA, 20 bp, synthetic construct
  source 1..20: mol_type = other DNA
ctgctcaagtccatctggta

SEQ ID NO: 61607 - DNA, 20 bp, synthetic construct
  source 1..20: mol_type = other DNA
tgttataggagctcaatcta

SEQ ID NO: 61608 - DNA, 20 bp, synthetic construct
  source 1..20: mol_type = other DNA
cctacctggtctgagcgatt

SEQ ID NO: 61609 - DNA, 20 bp, synthetic construct
  source 1..20: mol_type = other DNA
gcaaagagaaagccagatat

SEQ ID NO: 61610 - DNA, 20 bp, synthetic construct
  source 1..20: mol_type = other DNA
accaccaagatcaagttctc

SEQ ID NO: 61611 - DNA, 20 bp, synthetic construct
  source 1..20: mol_type = other DNA
gtcatccctacgggttgatg

SEQ ID NO: 61612 - DNA, 20 bp, synthetic construct
  source 1..20: mol_type = other DNA
gtgcaggaccgtgtacaggt

SEQ ID NO: 61613 - DNA, 20 bp, synthetic construct
  source 1..20: mol_type = other DNA
accagaggcggaaggcatcc

SEQ ID NO: 61614 - DNA, 20 bp, synthetic construct
  source 1..20: mol_type = other DNA
atgatgtagatgggctcctg

SEQ ID NO: 61615 - DNA, 20 bp, synthetic construct
  source 1..20: mol_type = other DNA
ctcacagttcctgtgcctta

SEQ ID NO: 61616 - DNA, 20 bp, synthetic construct
  source 1..20: mol_type = other DNA
tcgagcaggaaggcatacct

SEQ ID NO: 61617 - DNA, 20 bp, synthetic construct
  source 1..20: mol_type = other DNA
ctgatgaggtagtggtacac

SEQ ID NO: 61618 - DNA, 20 bp, synthetic construct
  source 1..20: mol_type = other DNA
gggccccaccttgtccagga

SEQ ID NO: 61619 - DNA, 20 bp, synthetic construct
  source 1..20: mol_type = other DNA
gtatcagtgtaaaggatcac

SEQ ID NO: 61620 - DNA, 20 bp, synthetic construct
  source 1..20: mol_type = other DNA
aaggagctggccaaaaagga

SEQ ID NO: 61621 - DNA, 20 bp, synthetic construct
  source 1..20: mol_type = other DNA
gcggaaggcatcctgattgg

SEQ ID NO: 61622 - DNA, 20 bp, synthetic construct
  source 1..20: mol_type = other DNA
attgaggaccactgcagcat

SEQ ID NO: 61623 - DNA, 20 bp, synthetic construct
  source 1..20: mol_type = other DNA
ggtgatcttgagttccccgt

SEQ ID NO: 61624 - DNA, 20 bp, synthetic construct
  source 1..20: mol_type = other DNA
gttgtcaaggacaagatcgg

SEQ ID NO: 61625 - DNA, 20 bp, synthetic construct
  source 1..20: mol_type = other DNA
gtacttctcctccgtctgct

SEQ ID NO: 61626 - DNA, 20 bp, synthetic construct
  source 1..20: mol_type = other DNA
gatgaggtgagggtgatggc

SEQ ID NO: 61627 - DNA, 20 bp, synthetic construct
  source 1..20: mol_type = other DNA
cgtcagtgtaaggtcattga

SEQ ID NO: 61628 - DNA, 20 bp, synthetic construct
  source 1..20: mol_type = other DNA
ccctcacctccacgcagcag

SEQ ID NO: 61629 - DNA, 20 bp, synthetic construct
  source 1..20: mol_type = other DNA
ctccccaggacctggctcag

SEQ ID NO: 61630 - DNA, 20 bp, synthetic construct
  source 1..20: mol_type = other DNA
acagtgtagtagctgtcgtc

SEQ ID NO: 61631 - DNA, 20 bp, synthetic construct
  source 1..20: mol_type = other DNA
gggctatgtggtcttcttgg

SEQ ID NO: 61632 - DNA, 20 bp, synthetic construct
  source 1..20: mol_type = other DNA
tcccgcaggcggttgagggt

SEQ ID NO: 61633 - DNA, 20 bp, synthetic construct
  source 1..20: mol_type = other DNA
caggaagttgaagaggcacc

SEQ ID NO: 61634 - DNA, 20 bp, synthetic construct
  source 1..20: mol_type = other DNA
ccatacctgcaatgttctcc

SEQ ID NO: 61635 - DNA, 20 bp, synthetic construct
  source 1..20: mol_type = other DNA
ctgggacatctgggggcgca

SEQ ID NO: 61636 - DNA, 20 bp, synthetic construct
  source 1..20: mol_type = other DNA
caccaagaaagtcccgtccg

SEQ ID NO: 61637 - DNA, 20 bp, synthetic construct
  source 1..20: mol_type = other DNA
tttgtgcaccgtgacctggc

SEQ ID NO: 61638 - DNA, 20 bp, synthetic construct
  source 1..20: mol_type = other DNA
cctgaccagagcacaggctg

SEQ ID NO: 61639 - DNA, 20 bp, synthetic construct
  source 1..20: mol_type = other DNA
tgtgggacagcacctgggat

SEQ ID NO: 61640 - DNA, 20 bp, synthetic construct
  source 1..20: mol_type = other DNA
ccccagggaggagatccctg

SEQ ID NO: 61641 - DNA, 20 bp, synthetic construct
  source 1..20: mol_type = other DNA
ttgagcagttccttgcgcag

SEQ ID NO: 61642 - DNA, 20 bp, synthetic construct
  source 1..20: mol_type = other DNA
gcggtaaaggcgtaccagat

SEQ ID NO: 61643 - DNA, 20 bp, synthetic construct
  source 1..20: mol_type = other DNA
ggtgagcaggtcagggtcgg

SEQ ID NO: 61644 - DNA, 20 bp, synthetic construct
  source 1..20: mol_type = other DNA
atacagagcagtgcctttga

SEQ ID NO: 61645 - DNA, 20 bp, synthetic construct
  source 1..20: mol_type = other DNA
atcgtcagacgctacaagga

SEQ ID NO: 61646 - DNA, 20 bp, synthetic construct
  source 1..20: mol_type = other DNA
gtgactgctggatctacaag

SEQ ID NO: 61647 - DNA, 20 bp, synthetic construct
  source 1..20: mol_type = other DNA
cagcacctgggatagagtag

SEQ ID NO: 61648 - DNA, 20 bp, synthetic construct
  source 1..20: mol_type = other DNA
ctgatatactgagaaaacag

SEQ ID NO: 61649 - DNA, 20 bp, synthetic construct
  source 1..20: mol_type = other DNA
gacagcccatccgcaggcag

SEQ ID NO: 61650 - DNA, 20 bp, synthetic construct
  source 1..20: mol_type = other DNA
gggcaaggtacgagtgggag

SEQ ID NO: 61651 - DNA, 20 bp, synthetic construct
  source 1..20: mol_type = other DNA
ccagagcgtgtcaaacttgg

SEQ ID NO: 61652 - DNA, 20 bp, synthetic construct
  source 1..20: mol_type = other DNA
cggtgaagagcctgaagcag

SEQ ID NO: 61653 - DNA, 20 bp, synthetic construct
  source 1..20: mol_type = other DNA
gagaatgacaccatagatga

SEQ ID NO: 61654 - DNA, 20 bp, synthetic construct
  source 1..20: mol_type = other DNA
acaggaacttgccgtcggtc

SEQ ID NO: 61655 - DNA, 20 bp, synthetic construct
  source 1..20: mol_type = other DNA
cctaccttcaaaacatctcc

SEQ ID NO: 61656 - DNA, 20 bp, synthetic construct
  source 1..20: mol_type = other DNA
gtgcaggacatctgagaact

SEQ ID NO: 61657 - DNA, 20 bp, synthetic construct
  source 1..20: mol_type = other DNA
agatgagcccgtccgccttc

SEQ ID NO: 61658 - DNA, 20 bp, synthetic construct
  source 1..20: mol_type = other DNA
gtaggaatacttgcagctaa

SEQ ID NO: 61659 - DNA, 20 bp, synthetic construct
  source 1..20: mol_type = other DNA
gtgtgagaaaatcatagctg

SEQ ID NO: 61660 - DNA, 20 bp, synthetic construct
  source 1..20: mol_type = other DNA
acaagttcagagagctccag

SEQ ID NO: 61661 - DNA, 20 bp, synthetic construct
  source 1..20: mol_type = other DNA
ccagcacggtgggtgtgaag

SEQ ID NO: 61662 - DNA, 20 bp, synthetic construct
  source 1..20: mol_type = other DNA
gcacccacctcaatagagat

SEQ ID NO: 61663 - DNA, 20 bp, synthetic construct
  source 1..20: mol_type = other DNA
cctcgaggtgggcaccgtca

SEQ ID NO: 61664 - DNA, 20 bp, synthetic construct
  source 1..20: mol_type = other DNA
gacagcacctgggatagagt

SEQ ID NO: 61665 - DNA, 20 bp, synthetic construct
  source 1..20: mol_type = other DNA
aggccaaagtcgctgatctt

SEQ ID NO: 61666 - DNA, 20 bp, synthetic construct
  source 1..20: mol_type = other DNA
ggtgaggagtaagaggagca

SEQ ID NO: 61667 - DNA, 20 bp, synthetic construct
  source 1..20: mol_type = other DNA
acaggctggggcttccttca

SEQ ID NO: 61668 - DNA, 20 bp, synthetic construct
  source 1..20: mol_type = other DNA
ccgccccacctggtccaggt

SEQ ID NO: 61669 - DNA, 20 bp, synthetic construct
  source 1..20: mol_type = other DNA
ccagacatcgctgcggctgg

SEQ ID NO: 61670 - DNA, 20 bp, synthetic construct
  source 1..20: mol_type = other DNA
agatacctggtggaaatggt

SEQ ID NO: 61671 - DNA, 20 bp, synthetic construct
  source 1..20: mol_type = other DNA
agtgagaatgacaccataga

SEQ ID NO: 61672 - DNA, 20 bp, synthetic construct
  source 1..20: mol_type = other DNA
tcgcagcgttgcaggtcctt

SEQ ID NO: 61673 - DNA, 20 bp, synthetic construct
  source 1..20: mol_type = other DNA
cgtaccagatggacttgagc

SEQ ID NO: 61674 - DNA, 20 bp, synthetic construct
  source 1..20: mol_type = other DNA
ccccaggaatgttctcagag

SEQ ID NO: 61675 - DNA, 20 bp, synthetic construct
  source 1..20: mol_type = other DNA
gcccccagatgtcccaggtg

SEQ ID NO: 61676 - DNA, 20 bp, synthetic construct
  source 1..20: mol_type = other DNA
ctcaacttccagacccctgg

SEQ ID NO: 61677 - DNA, 20 bp, synthetic construct
  source 1..20: mol_type = other DNA
tagacgaggaacctacaggg

SEQ ID NO: 61678 - DNA, 20 bp, synthetic construct
  source 1..20: mol_type = other DNA
gaaggcatggcattcattga

SEQ ID NO: 61679 - DNA, 20 bp, synthetic construct
  source 1..20: mol_type = other DNA
gttgatggcatggggtagca

SEQ ID NO: 61680 - DNA, 20 bp, synthetic construct
  source 1..20: mol_type = other DNA
ccctcaacttccagacccct

SEQ ID NO: 61681 - DNA, 20 bp, synthetic construct
  source 1..20: mol_type = other DNA
aggctacctgtgagtggcca

SEQ ID NO: 61682 - DNA, 20 bp, synthetic construct
  source 1..20: mol_type = other DNA
ctgggacagcatgttcttca

SEQ ID NO: 61683 - DNA, 20 bp, synthetic construct
  source 1..20: mol_type = other DNA
gtagttgtcgtccttcacct

SEQ ID NO: 61684 - DNA, 20 bp, synthetic construct
  source 1..20: mol_type = other DNA
gccggagccgttgtcgacga

SEQ ID NO: 61685 - DNA, 20 bp, synthetic construct
  source 1..20: mol_type = other DNA
gcatccaggtgcatgggtgt

SEQ ID NO: 61686 - DNA, 20 bp, synthetic construct
  source 1..20: mol_type = other DNA
gccctacctgaacctcttga

SEQ ID NO: 61687 - DNA, 20 bp, synthetic construct
  source 1..20: mol_type = other DNA
gaaaccaaggctgagaaata

SEQ ID NO: 61688 - DNA, 20 bp, synthetic construct
  source 1..20: mol_type = other DNA
gggcgtgagcttggcagggt

SEQ ID NO: 61689 - DNA, 20 bp, synthetic construct
  source 1..20: mol_type = other DNA
gaattaccgggagcacccca

SEQ ID NO: 61690 - DNA, 20 bp, synthetic construct
  source 1..20: mol_type = other DNA
caagaaatgctgcggggaag

SEQ ID NO: 61691 - DNA, 20 bp, synthetic construct
  source 1..20: mol_type = other DNA
cgacccagggtactacaacg

SEQ ID NO: 61692 - DNA, 20 bp, synthetic construct
  source 1..20: mol_type = other DNA
cccccaaggggaagttcatt

SEQ ID NO: 61693 - DNA, 20 bp, synthetic construct
  source 1..20: mol_type = other DNA
cccttcacaaaggactggat

SEQ ID NO: 61694 - DNA, 20 bp, synthetic construct
  source 1..20: mol_type = other DNA
tagagcacaaaaggaagcag

SEQ ID NO: 61695 - DNA, 20 bp, synthetic construct
  source 1..20: mol_type = other DNA
cacgagcgacagcacatagc

SEQ ID NO: 61696 - DNA, 20 bp, synthetic construct
  source 1..20: mol_type = other DNA
ttacctgctcggttgatctt

SEQ ID NO: 61697 - DNA, 20 bp, synthetic construct
  source 1..20: mol_type = other DNA
tgaggtcaacctgcgccccc

SEQ ID NO: 61698 - DNA, 20 bp, synthetic construct
  source 1..20: mol_type = other DNA
cagccactcgtgcctgtcct

SEQ ID NO: 61699 - DNA, 20 bp, synthetic construct
  source 1..20: mol_type = other DNA
cttacctagacaatgagaag

SEQ ID NO: 61700 - DNA, 20 bp, synthetic construct
  source 1..20: mol_type = other DNA
ctcggccacattgctcacag

SEQ ID NO: 61701 - DNA, 20 bp, synthetic construct
  source 1..20: mol_type = other DNA
cagacggaggagaagtacac

SEQ ID NO: 61702 - DNA, 20 bp, synthetic construct
  source 1..20: mol_type = other DNA
gtttcaggaaccgttgcagg

SEQ ID NO: 61703 - DNA, 20 bp, synthetic construct
  source 1..20: mol_type = other DNA
aggagaacatctggaagtca

SEQ ID NO: 61704 - DNA, 20 bp, synthetic construct
  source 1..20: mol_type = other DNA
ctacctgtaatcggcaactg

SEQ ID NO: 61705 - DNA, 20 bp, synthetic construct
  source 1..20: mol_type = other DNA
gaggattccatccagcaggt

SEQ ID NO: 61706 - DNA, 20 bp, synthetic construct
  source 1..20: mol_type = other DNA
gctcaccaatctgacaagcc

SEQ ID NO: 61707 - DNA, 20 bp, synthetic construct
  source 1..20: mol_type = other DNA
agtaagcaggcgctcagcga

SEQ ID NO: 61708 - DNA, 20 bp, synthetic construct
  source 1..20: mol_type = other DNA
ggtcaacctgcgcccccaga

SEQ ID NO: 61709 - DNA, 20 bp, synthetic construct
  source 1..20: mol_type = other DNA
tcccctcaccagcagcagct

SEQ ID NO: 61710 - DNA, 20 bp, synthetic construct
  source 1..20: mol_type = other DNA
ctggcacctggagaaggagg

SEQ ID NO: 61711 - DNA, 20 bp, synthetic construct
  source 1..20: mol_type = other DNA
gtgttaccagaaagagagcg

SEQ ID NO: 61712 - DNA, 20 bp, synthetic construct
  source 1..20: mol_type = other DNA
acatgtcccggtagcaagca

SEQ ID NO: 61713 - DNA, 20 bp, synthetic construct
  source 1..20: mol_type = other DNA
accagctcctgagagaacca

SEQ ID NO: 61714 - DNA, 20 bp, synthetic construct
  source 1..20: mol_type = other DNA
tccaggtacttcatccccat

SEQ ID NO: 61715 - DNA, 20 bp, synthetic construct
  source 1..20: mol_type = other DNA
atctatggtgtcattctcac

SEQ ID NO: 61716 - DNA, 20 bp, synthetic construct
  source 1..20: mol_type = other DNA
gttcaggttcagccggatgt

SEQ ID NO: 61717 - DNA, 20 bp, synthetic construct
  source 1..20: mol_type = other DNA
caggaacaaggcagtgagaa

SEQ ID NO: 61718 - DNA, 20 bp, synthetic construct
  source 1..20: mol_type = other DNA
atgcacctggatgcccttca

SEQ ID NO: 61719 - DNA, 20 bp, synthetic construct
  source 1..20: mol_type = other DNA
aatggacagctggaaattgg

SEQ ID NO: 61720 - DNA, 20 bp, synthetic construct
  source 1..20: mol_type = other DNA
acagtgtgtcagaactgcat

SEQ ID NO: 61721 - DNA, 20 bp, synthetic construct
  source 1..20: mol_type = other DNA
gctgcagtagcggccataga

SEQ ID NO: 61722 - DNA, 20 bp, synthetic construct
  source 1..20: mol_type = other DNA
ctccagctgcagcatgaccg

SEQ ID NO: 61723 - DNA, 20 bp, synthetic construct
  source 1..20: mol_type = other DNA
gtagagccgaaccagccgct

SEQ ID NO: 61724 - DNA, 20 bp, synthetic construct
  source 1..20: mol_type = other DNA
agcactcactcgatctggtc

SEQ ID NO: 61725 - DNA, 20 bp, synthetic construct
  source 1..20: mol_type = other DNA
gaggaggagatccagtagtg

SEQ ID NO: 61726 - DNA, 20 bp, synthetic construct
  source 1..20: mol_type = other DNA
gaagagattgtaggaatact

SEQ ID NO: 61727 - DNA, 20 bp, synthetic construct
  source 1..20: mol_type = other DNA
cgcactcatgagtgactgct

SEQ ID NO: 61728 - DNA, 20 bp, synthetic construct
  source 1..20: mol_type = other DNA
gcaggaaggcatacctggaa

SEQ ID NO: 61729 - DNA, 20 bp, synthetic construct
  source 1..20: mol_type = other DNA
cagcagcaggagccccagca

SEQ ID NO: 61730 - DNA, 20 bp, synthetic construct
  source 1..20: mol_type = other DNA
cccagacactccttgtgtgc

SEQ ID NO: 61731 - DNA, 20 bp, synthetic construct
  source 1..20: mol_type = other DNA
gatggagcccagcgtgtcag

SEQ ID NO: 61732 - DNA, 20 bp, synthetic construct
  source 1..20: mol_type = other DNA
aagtacaggaagcagatccg

SEQ ID NO: 61733 - DNA, 20 bp, synthetic construct
  source 1..20: mol_type = other DNA
cttgatcttggtggtaaggg

SEQ ID NO: 61734 - DNA, 20 bp, synthetic construct
  source 1..20: mol_type = other DNA
ggaaagagggttgttcatgg

SEQ ID NO: 61735 - DNA, 20 bp, synthetic construct
  source 1..20: mol_type = other DNA
ccgcagggtgaacctcccgt

SEQ ID NO: 61736 - DNA, 20 bp, synthetic construct
  source 1..20: mol_type = other DNA
cacgaccgcaaggaggccct

SEQ ID NO: 61737 - DNA, 20 bp, synthetic construct
  source 1..20: mol_type = other DNA
cgggacatgtcatccttccc

SEQ ID NO: 61738 - DNA, 20 bp, synthetic construct
  source 1..20: mol_type = other DNA
tgcaggtgaggagtaagagg

SEQ ID NO: 61739 - DNA, 20 bp, synthetic construct
  source 1..20: mol_type = other DNA
ccagtagtgggaaagagggt

SEQ ID NO: 61740 - DNA, 20 bp, synthetic construct
  source 1..20: mol_type = other DNA
agcgacatggccctcgccgg

SEQ ID NO: 61741 - DNA, 20 bp, synthetic construct
  source 1..20: mol_type = other DNA
tcagatgtggctgtgagcaa

SEQ ID NO: 61742 - DNA, 20 bp, synthetic construct
  source 1..20: mol_type = other DNA
taccactacctcatcagcca

SEQ ID NO: 61743 - DNA, 20 bp, synthetic construct
  source 1..20: mol_type = other DNA
tgacaccatgtaccaggaca

SEQ ID NO: 61744 - DNA, 20 bp, synthetic construct
  source 1..20: mol_type = other DNA
agcaccaccctgaaaggaag

SEQ ID NO: 61745 - DNA, 20 bp, synthetic construct
  source 1..20: mol_type = other DNA
gccagaagccctacaaggca

SEQ ID NO: 61746 - DNA, 20 bp, synthetic construct
  source 1..20: mol_type = other DNA
cgcaggttctccttctccat

SEQ ID NO: 61747 - DNA, 20 bp, synthetic construct
  source 1..20: mol_type = other DNA
agaaggacaccatcccggag

SEQ ID NO: 61748 - DNA, 20 bp, synthetic construct
  source 1..20: mol_type = other DNA
gcaggatggccgcggtgaaa

SEQ ID NO: 61749 - DNA, 20 bp, synthetic construct
  source 1..20: mol_type = other DNA
actgcataggaccagtctct

SEQ ID NO: 61750 - DNA, 20 bp, synthetic construct
  source 1..20: mol_type = other DNA
cccggtcaggtacctggata

SEQ ID NO: 61751 - DNA, 20 bp, synthetic construct
  source 1..20: mol_type = other DNA
cggctatgtgctgtcgctcg

SEQ ID NO: 61752 - DNA, 20 bp, synthetic construct
  source 1..20: mol_type = other DNA
tcggccaggaaggcgtccgg

SEQ ID NO: 61753 - DNA, 20 bp, synthetic construct
  source 1..20: mol_type = other DNA
actcacgtgttgtgcgagga

SEQ ID NO: 61754 - DNA, 20 bp, synthetic construct
  source 1..20: mol_type = other DNA
ggatggtgtccttctgtgtc

SEQ ID NO: 61755 - DNA, 20 bp, synthetic construct
  source 1..20: mol_type = other DNA
acaggtcagcagcagcacag

SEQ ID NO: 61756 - DNA, 20 bp, synthetic construct
  source 1..20: mol_type = other DNA
ggcggctatgtgctgtcgct

SEQ ID NO: 61757 - DNA, 20 bp, synthetic construct
  source 1..20: mol_type = other DNA
cacatggagggaccctcccc

SEQ ID NO: 61758 - DNA, 20 bp, synthetic construct
  source 1..20: mol_type = other DNA
agtgtaaccggcacatgctc

SEQ ID NO: 61759 - DNA, 20 bp, synthetic construct
  source 1..20: mol_type = other DNA
gatgaagaagccaacctcct

SEQ ID NO: 61760 - DNA, 20 bp, synthetic construct
  source 1..20: mol_type = other DNA
ggaggagaaggaggacctgg

SEQ ID NO: 61761 - DNA, 20 bp, synthetic construct
  source 1..20: mol_type = other DNA
atggcagcggtagccctgat

SEQ ID NO: 61762 - DNA, 20 bp, synthetic construct
  source 1..20: mol_type = other DNA
agaagtacactgacacgctg

SEQ ID NO: 61763 - DNA, 20 bp, synthetic construct
  source 1..20: mol_type = other DNA
tccacagtggaggaaggcca

SEQ ID NO: 61764 - DNA, 20 bp, synthetic construct
  source 1..20: mol_type = other DNA
gggaagggcctggggggtca

SEQ ID NO: 61765 - DNA, 20 bp, synthetic construct
  source 1..20: mol_type = other DNA
gcgacagcacatagccgccc

SEQ ID NO: 61766 - DNA, 20 bp, synthetic construct
  source 1..20: mol_type = other DNA
agttgagcagcctctgcacc

SEQ ID NO: 61767 - DNA, 20 bp, synthetic construct
  source 1..20: mol_type = other DNA
ctcagccgctatatcaaccc

SEQ ID NO: 61768 - DNA, 20 bp, synthetic construct
  source 1..20: mol_type = other DNA
gtatagcgggtgtttctcat

SEQ ID NO: 61769 - DNA, 20 bp, synthetic construct
  source 1..20: mol_type = other DNA
agtagatcttgctgctggtc

SEQ ID NO: 61770 - DNA, 20 bp, synthetic construct
  source 1..20: mol_type = other DNA
gagtaagaggagcaggctcc

SEQ ID NO: 61771 - DNA, 20 bp, synthetic construct
  source 1..20: mol_type = other DNA
tgtcttgaagaacagctcat

SEQ ID NO: 61772 - DNA, 20 bp, synthetic construct
  source 1..20: mol_type = other DNA
gaaggttctaatgttcttaa

SEQ ID NO: 61773 - DNA, 20 bp, synthetic construct
  source 1..20: mol_type = other DNA
ctacagcacaagaagctggc

SEQ ID NO: 61774 - DNA, 20 bp, synthetic construct
  source 1..20: mol_type = other DNA
cttcacaaaggactggatag

SEQ ID NO: 61775 - DNA, 20 bp, synthetic construct
  source 1..20: mol_type = other DNA
gtcacaggtcatctacaccc

SEQ ID NO: 61776 - DNA, 20 bp, synthetic construct
  source 1..20: mol_type = other DNA
ccaggctgtagtaacaggct

SEQ ID NO: 61777 - DNA, 20 bp, synthetic construct
  source 1..20: mol_type = other DNA
cgcacactcaatgcagcgac

SEQ ID NO: 61778 - DNA, 20 bp, synthetic construct
  source 1..20: mol_type = other DNA
ggacctgtctgttcatctct

SEQ ID NO: 61779 - DNA, 20 bp, synthetic construct
  source 1..20: mol_type = other DNA
aagaagtggatggagcagtt

SEQ ID NO: 61780 - DNA, 20 bp, synthetic construct
  source 1..20: mol_type = other DNA
cgcactgagccaggtcctgg

SEQ ID NO: 61781 - DNA, 20 bp, synthetic construct
  source 1..20: mol_type = other DNA
ctcgttcatcaggaagtgcg

SEQ ID NO: 61782 - DNA, 20 bp, synthetic construct
  source 1..20: mol_type = other DNA
ggagaatgtggagtgtaacc

SEQ ID NO: 61783 - DNA, 20 bp, synthetic construct
  source 1..20: mol_type = other DNA
ctatccaggtacctgaccgg

SEQ ID NO: 61784 - DNA, 20 bp, synthetic construct
  source 1..20: mol_type = other DNA
gcagggcagcccgtcggggt

SEQ ID NO: 61785 - DNA, 20 bp, synthetic construct
  source 1..20: mol_type = other DNA
acagcgacatggccctcgcc

SEQ ID NO: 61786 - DNA, 20 bp, synthetic construct
  source 1..20: mol_type = other DNA
gagagagtgagaccttcgtg

SEQ ID NO: 61787 - DNA, 20 bp, synthetic construct
  source 1..20: mol_type = other DNA
gctgcaccaggtgtccatgg

SEQ ID NO: 61788 - DNA, 20 bp, synthetic construct
  source 1..20: mol_type = other DNA
ggtaccacagcagcctgacg

SEQ ID NO: 61789 - DNA, 20 bp, synthetic construct
  source 1..20: mol_type = other DNA
atgtccaggatggccttgtc

SEQ ID NO: 61790 - DNA, 20 bp, synthetic construct
  source 1..20: mol_type = other DNA
gagaacattcctggggaatc

SEQ ID NO: 61791 - DNA, 20 bp, synthetic construct
  source 1..20: mol_type = other DNA
gcacttacccacaatggtgg

SEQ ID NO: 61792 - DNA, 20 bp, synthetic construct
  source 1..20: mol_type = other DNA
caggatgtggtctcctcaaa

SEQ ID NO: 61793 - DNA, 20 bp, synthetic construct
  source 1..20: mol_type = other DNA
catgacggtgcccacctcga

SEQ ID NO: 61794 - DNA, 20 bp, synthetic construct
  source 1..20: mol_type = other DNA
gaacattcctggggaatcag

SEQ ID NO: 61795 - DNA, 20 bp, synthetic construct
  source 1..20: mol_type = other DNA
atgaagacctggtagagatt

SEQ ID NO: 61796 - DNA, 20 bp, synthetic construct
  source 1..20: mol_type = other DNA
gttcatactcacttcctaaa

SEQ ID NO: 61797 - DNA, 20 bp, synthetic construct
  source 1..20: mol_type = other DNA
gctggagaacttgcggaagt

SEQ ID NO: 61798 - DNA, 20 bp, synthetic construct
  source 1..20: mol_type = other DNA
tgccaagctcacgccctacc

SEQ ID NO: 61799 - DNA, 20 bp, synthetic construct
  source 1..20: mol_type = other DNA
cttactctggaagctctctg

SEQ ID NO: 61800 - DNA, 20 bp, synthetic construct
  source 1..20: mol_type = other DNA
cccggaactcccttgagaag

SEQ ID NO: 61801 - DNA, 20 bp, synthetic construct
  source 1..20: mol_type = other DNA
cctacaaggcaggcgcgggc

SEQ ID NO: 61802 - DNA, 20 bp, synthetic construct
  source 1..20: mol_type = other DNA
aagagaaagccagatatggt

SEQ ID NO: 61803 - DNA, 20 bp, synthetic construct
  source 1..20: mol_type = other DNA
tcagggctaccgctgccatc

SEQ ID NO: 61804 - DNA, 20 bp, synthetic construct
  source 1..20: mol_type = other DNA
gctcacgccctacctgcgtc

SEQ ID NO: 61805 - DNA, 20 bp, synthetic construct
  source 1..20: mol_type = other DNA
gggttgagtccattgtccac

SEQ ID NO: 61806 - DNA, 20 bp, synthetic construct
  source 1..20: mol_type = other DNA
tcgaaggcctcatcccgcat

SEQ ID NO: 61807 - DNA, 20 bp, synthetic construct
  source 1..20: mol_type = other DNA
cgatggagtcgtttcccggg

SEQ ID NO: 61808 - DNA, 20 bp, synthetic construct
  source 1..20: mol_type = other DNA
ttaaccagcaggacgttgcg

SEQ ID NO: 61809 - DNA, 20 bp, synthetic construct
  source 1..20: mol_type = other DNA
ccagtaccttaagagaacac

SEQ ID NO: 61810 - DNA, 20 bp, synthetic construct
  source 1..20: mol_type = other DNA
agtaacaggctcgcatgcgc

SEQ ID NO: 61811 - DNA, 20 bp, synthetic construct
  source 1..20: mol_type = other DNA
ttcctcaccaggggtctgga

SEQ ID NO: 61812 - DNA, 20 bp, synthetic construct
  source 1..20: mol_type = other DNA
ctccagccccggccctcggg

SEQ ID NO: 61813 - DNA, 20 bp, synthetic construct
  source 1..20: mol_type = other DNA
agtgaaggtgggtaccactg

SEQ ID NO: 61814 - DNA, 20 bp, synthetic construct
  source 1..20: mol_type = other DNA
catcaggagctgtgggctgt

SEQ ID NO: 61815 - DNA, 20 bp, synthetic construct
  source 1..20: mol_type = other DNA
ttgacctcacgcaggttgat

SEQ ID NO: 61816 - DNA, 20 bp, synthetic construct
  source 1..20: mol_type = other DNA
tccagctggtgcatgatctg

SEQ ID NO: 61817 - DNA, 20 bp, synthetic construct
  source 1..20: mol_type = other DNA
acgaggaaggagccgtcagg

SEQ ID NO: 61818 - DNA, 20 bp, synthetic construct
  source 1..20: mol_type = other DNA
cagctcaccatcttggtgaa

SEQ ID NO: 61819 - DNA, 20 bp, synthetic construct
  source 1..20: mol_type = other DNA
ccactactggatctcctcct

SEQ ID NO: 61820 - DNA, 20 bp, synthetic construct
  source 1..20: mol_type = other DNA
taagcaggcgctcagcgatg

SEQ ID NO: 61821 - DNA, 20 bp, synthetic construct
  source 1..20: mol_type = other DNA
aagcattgccgtgtccagca

SEQ ID NO: 61822 - DNA, 20 bp, synthetic construct
  source 1..20: mol_type = other DNA
catcagcaggtcccgcaggg

SEQ ID NO: 61823 - DNA, 20 bp, synthetic construct
  source 1..20: mol_type = other DNA
ccccaggacctggctcagtg

SEQ ID NO: 61824 - DNA, 20 bp, synthetic construct
  source 1..20: mol_type = other DNA
cgcctcaccaggttctcaat

SEQ ID NO: 61825 - DNA, 20 bp, synthetic construct
  source 1..20: mol_type = other DNA
tccacagtggagtccattga

SEQ ID NO: 61826 - DNA, 20 bp, synthetic construct
  source 1..20: mol_type = other DNA
tgacaggccttgcaggatgt

SEQ ID NO: 61827 - DNA, 20 bp, synthetic construct
  source 1..20: mol_type = other DNA
aggagatccagtagtgggaa

SEQ ID NO: 61828 - DNA, 20 bp, synthetic construct
  source 1..20: mol_type = other DNA
ggatgcccggaactcccttg

SEQ ID NO: 61829 - DNA, 20 bp, synthetic construct
  source 1..20: mol_type = other DNA
ttggaggtctcggctcctca

SEQ ID NO: 61830 - DNA, 20 bp, synthetic construct
  source 1..20: mol_type = other DNA
tgcaggaaatcactcaattc

SEQ ID NO: 61831 - DNA, 20 bp, synthetic construct
  source 1..20: mol_type = other DNA
ccacgaaggtctcactctct

SEQ ID NO: 61832 - DNA, 20 bp, synthetic construct
  source 1..20: mol_type = other DNA
gtagcgcatggctaagttgt

SEQ ID NO: 61833 - DNA, 20 bp, synthetic construct
  source 1..20: mol_type = other DNA
tccaggtctaggcaactgaa

SEQ ID NO: 61834 - DNA, 20 bp, synthetic construct
  source 1..20: mol_type = other DNA
gagatggagaagtcccctgg

SEQ ID NO: 61835 - DNA, 20 bp, synthetic construct
  source 1..20: mol_type = other DNA
agggtgaacctcccgttgtt

SEQ ID NO: 61836 - DNA, 20 bp, synthetic construct
  source 1..20: mol_type = other DNA
ggaatacttgcagctaaggt

SEQ ID NO: 61837 - DNA, 20 bp, synthetic construct
  source 1..20: mol_type = other DNA
ttccggagccacctggagag

SEQ ID NO: 61838 - DNA, 20 bp, synthetic construct
  source 1..20: mol_type = other DNA
ggaactgcaaggtggtgtcc

SEQ ID NO: 61839 - DNA, 20 bp, synthetic construct
  source 1..20: mol_type = other DNA
ccagaaagagagcgtgtagt

SEQ ID NO: 61840 - DNA, 20 bp, synthetic construct
  source 1..20: mol_type = other DNA
gccagctccaacatctatcc

SEQ ID NO: 61841 - DNA, 20 bp, synthetic construct
  source 1..20: mol_type = other DNA
ccagcagtcactcatgagtg

SEQ ID NO: 61842 - DNA, 20 bp, synthetic construct
  source 1..20: mol_type = other DNA
cgagcataggcttccaagga

SEQ ID NO: 61843 - DNA, 20 bp, synthetic construct
  source 1..20: mol_type = other DNA
agcctccagcaggcagtgct

SEQ ID NO: 61844 - DNA, 20 bp, synthetic construct
  source 1..20: mol_type = other DNA
tgagccagagactggtccta

SEQ ID NO: 61845 - DNA, 20 bp, synthetic construct
  source 1..20: mol_type = other DNA
ctcacgcacttcctgatgaa

SEQ ID NO: 61846 - DNA, 20 bp, synthetic construct
  source 1..20: mol_type = other DNA
gtggtaccagggcatccgct

SEQ ID NO: 61847 - DNA, 20 bp, synthetic construct
  source 1..20: mol_type = other DNA
catagacgaggaacctacag

SEQ ID NO: 61848 - DNA, 20 bp, synthetic construct
  source 1..20: mol_type = other DNA
cctcgaggctgcggcagagg

SEQ ID NO: 61849 - DNA, 20 bp, synthetic construct
  source 1..20: mol_type = other DNA
taccacagcagcctgacgcg

SEQ ID NO: 61850 - DNA, 20 bp, synthetic construct
  source 1..20: mol_type = other DNA
tgtccaacagccggcctagg

SEQ ID NO: 61851 - DNA, 20 bp, synthetic construct
  source 1..20: mol_type = other DNA
gctctccaagaagaccacat

SEQ ID NO: 61852 - DNA, 20 bp, synthetic construct
  source 1..20: mol_type = other DNA
gcggatggagtgcccaccag

SEQ ID NO: 61853 - DNA, 20 bp, synthetic construct
  source 1..20: mol_type = other DNA
tctactcaccagagatgaac

SEQ ID NO: 61854 - DNA, 20 bp, synthetic construct
  source 1..20: mol_type = other DNA
tgtacatgaggctgcggtac

SEQ ID NO: 61855 - DNA, 20 bp, synthetic construct
  source 1..20: mol_type = other DNA
gtagaacaaagtcatgacgg

SEQ ID NO: 61856 - DNA, 20 bp, synthetic construct
  source 1..20: mol_type = other DNA
tccagcaggccaaagctctg

SEQ ID NO: 61857 - DNA, 20 bp, synthetic construct
  source 1..20: mol_type = other DNA
tgaagagggcctggttcatc

SEQ ID NO: 61858 - DNA, 20 bp, synthetic construct
  source 1..20: mol_type = other DNA
cccagtcctgcagctcctcc

SEQ ID NO: 61859 - DNA, 20 bp, synthetic construct
  source 1..20: mol_type = other DNA
tcctccagctgccgcaacct

SEQ ID NO: 61860 - DNA, 20 bp, synthetic construct
  source 1..20: mol_type = other DNA
atgtagaacgagtcccccga

SEQ ID NO: 61861 - DNA, 20 bp, synthetic construct
  source 1..20: mol_type = other DNA
ctcgcacaacacgtgagtgt

SEQ ID NO: 61862 - DNA, 20 bp, synthetic construct
  source 1..20: mol_type = other DNA
aaggcacaggaactgtgagg

SEQ ID NO: 61863 - DNA, 20 bp, synthetic construct
  source 1..20: mol_type = other DNA
gaggaagaagattgccctgg

SEQ ID NO: 61864 - DNA, 20 bp, synthetic construct
  source 1..20: mol_type = other DNA
ctcgatgggaaagtggtgga

SEQ ID NO: 61865 - DNA, 20 bp, synthetic construct
  source 1..20: mol_type = other DNA
tgagtgcgtacagttcgggt

SEQ ID NO: 61866 - DNA, 20 bp, synthetic construct
  source 1..20: mol_type = other DNA
agaacaggaaggtgacaaac

SEQ ID NO: 61867 - DNA, 20 bp, synthetic construct
  source 1..20: mol_type = other DNA
gccagcttcaggtgctcctc

SEQ ID NO: 61868 - DNA, 20 bp, synthetic construct
  source 1..20: mol_type = other DNA
ttgcagttcagcaggagcgc

SEQ ID NO: 61869 - DNA, 20 bp, synthetic construct
  source 1..20: mol_type = other DNA
cgaggctgcggcagaggtgc

SEQ ID NO: 61870 - DNA, 20 bp, synthetic construct
  source 1..20: mol_type = other DNA
ccgcagcagcggctcccgca

SEQ ID NO: 61871 - DNA, 20 bp, synthetic construct
  source 1..20: mol_type = other DNA
accagctgcagggagcaggc

SEQ ID NO: 61872 - DNA, 20 bp, synthetic construct
  source 1..20: mol_type = other DNA
cagcggtagccctgatagaa

SEQ ID NO: 61873 - DNA, 20 bp, synthetic construct
  source 1..20: mol_type = other DNA
gcgctcgatgggaaagtggt

SEQ ID NO: 61874 - DNA, 20 bp, synthetic construct
  source 1..20: mol_type = other DNA
ccacccagatggtcttgcgc

SEQ ID NO: 61875 - DNA, 20 bp, synthetic construct
  source 1..20: mol_type = other DNA
gaagcaccaccctgaaagga

SEQ ID NO: 61876 - DNA, 20 bp, synthetic construct
  source 1..20: mol_type = other DNA
cctgccagagctggaccctg

SEQ ID NO: 61877 - DNA, 20 bp, synthetic construct
  source 1..20: mol_type = other DNA
aagtgttaccagaaagagag

SEQ ID NO: 61878 - DNA, 20 bp, synthetic construct
  source 1..20: mol_type = other DNA
gcgcagaaaggcaaattcag

SEQ ID NO: 61879 - DNA, 20 bp, synthetic construct
  source 1..20: mol_type = other DNA
ggccagcacggtgggtgtga

SEQ ID NO: 61880 - DNA, 20 bp, synthetic construct
  source 1..20: mol_type = other DNA
ccgctcacctggctcagggg

SEQ ID NO: 61881 - DNA, 20 bp, synthetic construct
  source 1..20: mol_type = other DNA
tcaccagagatgaacagaca

SEQ ID NO: 61882 - DNA, 20 bp, synthetic construct
  source 1..20: mol_type = other DNA
agggccatgtcgctgttggg

SEQ ID NO: 61883 - DNA, 20 bp, synthetic construct
  source 1..20: mol_type = other DNA
gcagaagtaaatatctgttt

SEQ ID NO: 61884 - DNA, 20 bp, synthetic construct
  source 1..20: mol_type = other DNA
ttcttaaggcacaggaactg

SEQ ID NO: 61885 - DNA, 20 bp, synthetic construct
  source 1..20: mol_type = other DNA
gtccaggacagagcagacag

SEQ ID NO: 61886 - DNA, 20 bp, synthetic construct
  source 1..20: mol_type = other DNA
tgagaagttcggcctcaagc

SEQ ID NO: 61887 - DNA, 20 bp, synthetic construct
  source 1..20: mol_type = other DNA
gttgatatagcggctgagca

SEQ ID NO: 61888 - DNA, 20 bp, synthetic construct
  source 1..20: mol_type = other DNA
ctttacactgatacatccct

SEQ ID NO: 61889 - DNA, 20 bp, synthetic construct
  source 1..20: mol_type = other DNA
gcctggcacctggagaagga

SEQ ID NO: 61890 - DNA, 20 bp, synthetic construct
  source 1..20: mol_type = other DNA
ctctacatagaagccagggt

SEQ ID NO: 61891 - DNA, 20 bp, synthetic construct
  source 1..20: mol_type = other DNA
tgcaggtacgcaggccccat

SEQ ID NO: 61892 - DNA, 20 bp, synthetic construct
  source 1..20: mol_type = other DNA
tgaggggagcccgtcggcag

SEQ ID NO: 61893 - DNA, 20 bp, synthetic construct
  source 1..20: mol_type = other DNA
acatgaggctgcggtacagc

SEQ ID NO: 61894 - DNA, 20 bp, synthetic construct
  source 1..20: mol_type = other DNA
gaattgaagaagaagtggat

SEQ ID NO: 61895 - DNA, 20 bp, synthetic construct
  source 1..20: mol_type = other DNA
tgtatatgggaattactccc

SEQ ID NO: 61896 - DNA, 20 bp, synthetic construct
  source 1..20: mol_type = other DNA
cgggagcgggaccaggtaca

SEQ ID NO: 61897 - DNA, 20 bp, synthetic construct
  source 1..20: mol_type = other DNA
cagcagggaggccaactcca

SEQ ID NO: 61898 - DNA, 20 bp, synthetic construct
  source 1..20: mol_type = other DNA
gttgagggccacaagctgac

SEQ ID NO: 61899 - DNA, 20 bp, synthetic construct
  source 1..20: mol_type = other DNA
ctgcaggttgtagatcctgt

SEQ ID NO: 61900 - DNA, 20 bp, synthetic construct
  source 1..20: mol_type = other DNA
gttgcaggggcttcaagaaa

SEQ ID NO: 61901 - DNA, 20 bp, synthetic construct
  source 1..20: mol_type = other DNA
cctctgcagtgtgcagtcaa

SEQ ID NO: 61902 - DNA, 20 bp, synthetic construct
  source 1..20: mol_type = other DNA
ttctggaggtagaatgtcac

SEQ ID NO: 61903 - DNA, 20 bp, synthetic construct
  source 1..20: mol_type = other DNA
tgagcaggatgaagatgaag

SEQ ID NO: 61904 - DNA, 20 bp, synthetic construct
  source 1..20: mol_type = other DNA
tagatgacctgtgacggggc

SEQ ID NO: 61905 - DNA, 20 bp, synthetic construct
  source 1..20: mol_type = other DNA
taggacaaggcctcccacat

SEQ ID NO: 61906 - DNA, 20 bp, synthetic construct
  source 1..20: mol_type = other DNA
gatgaagagcacgatggggt

SEQ ID NO: 61907 - DNA, 20 bp, synthetic construct
  source 1..20: mol_type = other DNA
atgacctgtgacggggcagt

SEQ ID NO: 61908 - DNA, 20 bp, synthetic construct
  source 1..20: mol_type = other DNA
acgaggaacctacagggaga

SEQ ID NO: 61909 - DNA, 20 bp, synthetic construct
  source 1..20: mol_type = other DNA
tggacagtttgtcaccttcc

SEQ ID NO: 61910 - DNA, 20 bp, synthetic construct
  source 1..20: mol_type = other DNA
cagagagggagaagtcccca

SEQ ID NO: 61911 - DNA, 20 bp, synthetic construct
  source 1..20: mol_type = other DNA
ttggcagatgtcgggccccc

SEQ ID NO: 61912 - DNA, 20 bp, synthetic construct
  source 1..20: mol_type = other DNA
gctgtaggggatgaggctga

SEQ ID NO: 61913 - DNA, 20 bp, synthetic construct
  source 1..20: mol_type = other DNA
ctcaccaggggtctggaagt

SEQ ID NO: 61914 - DNA, 20 bp, synthetic construct
  source 1..20: mol_type = other DNA
cctgatgaacgaggtcatca

SEQ ID NO: 61915 - DNA, 20 bp, synthetic construct
  source 1..20: mol_type = other DNA
caggcactggcgcagcagga

SEQ ID NO: 61916 - DNA, 20 bp, synthetic construct
  source 1..20: mol_type = other DNA
ggagaaggaggtgatatttg

SEQ ID NO: 61917 - DNA, 20 bp, synthetic construct
  source 1..20: mol_type = other DNA
caggagccccagcacgcagg

SEQ ID NO: 61918 - DNA, 20 bp, synthetic construct
  source 1..20: mol_type = other DNA
ttagcagctccacgcgcgtc

SEQ ID NO: 61919 - DNA, 20 bp, synthetic construct
  source 1..20: mol_type = other DNA
ccattcctggaacagaccaa

SEQ ID NO: 61920 - DNA, 20 bp, synthetic construct
  source 1..20: mol_type = other DNA
ttaggaagtgagtatgaaca

SEQ ID NO: 61921 - DNA, 20 bp, synthetic construct
  source 1..20: mol_type = other DNA
gcagcgacagcccatccgca

SEQ ID NO: 61922 - DNA, 20 bp, synthetic construct
  source 1..20: mol_type = other DNA
cgccacagctccatggctac

SEQ ID NO: 61923 - DNA, 20 bp, synthetic construct
  source 1..20: mol_type = other DNA
gaggagctgctgggctctgg

SEQ ID NO: 61924 - DNA, 20 bp, synthetic construct
  source 1..20: mol_type = other DNA
ttctcactgccttgttcctg

SEQ ID NO: 61925 - DNA, 20 bp, synthetic construct
  source 1..20: mol_type = other DNA
tgcctgcaggatggccgcgg

SEQ ID NO: 61926 - DNA, 20 bp, synthetic construct
  source 1..20: mol_type = other DNA
ggcgatgccagaccccgcgg

SEQ ID NO: 61927 - DNA, 20 bp, synthetic construct
  source 1..20: mol_type = other DNA
gcggagcagctcctctacgc

SEQ ID NO: 61928 - DNA, 20 bp, synthetic construct
  source 1..20: mol_type = other DNA
cacctcgaggctgcggcaga

SEQ ID NO: 61929 - DNA, 20 bp, synthetic construct
  source 1..20: mol_type = other DNA
tgaagagcacgggccggcgg

SEQ ID NO: 61930 - DNA, 20 bp, synthetic construct
  source 1..20: mol_type = other DNA
tcacgccagggtctcagtac

SEQ ID NO: 61931 - DNA, 20 bp, synthetic construct
  source 1..20: mol_type = other DNA
cccaggcccttccccaccga

SEQ ID NO: 61932 - DNA, 20 bp, synthetic construct
  source 1..20: mol_type = other DNA
cctgcagctggtggagtatc

SEQ ID NO: 61933 - DNA, 20 bp, synthetic construct
  source 1..20: mol_type = other DNA
gaactcaagatcacctcggt

SEQ ID NO: 61934 - DNA, 20 bp, synthetic construct
  source 1..20: mol_type = other DNA
gactcacctatctgaggatg

SEQ ID NO: 61935 - DNA, 20 bp, synthetic construct
  source 1..20: mol_type = other DNA
cgcaccaagaaagtcccgtc

SEQ ID NO: 61936 - DNA, 20 bp, synthetic construct
  source 1..20: mol_type = other DNA
ctggagaaggaggtgatatt

SEQ ID NO: 61937 - DNA, 20 bp, synthetic construct
  source 1..20: mol_type = other DNA
gacagcacatagccgcccag

SEQ ID NO: 61938 - DNA, 20 bp, synthetic construct
  source 1..20: mol_type = other DNA
cttcatccccatggacacct

SEQ ID NO: 61939 - DNA, 20 bp, synthetic construct
  source 1..20: mol_type = other DNA
ttcctccactgtggagaggg

SEQ ID NO: 61940 - DNA, 20 bp, synthetic construct
  source 1..20: mol_type = other DNA
ttaccagaaagagagcgtgt

SEQ ID NO: 61941 - DNA, 20 bp, synthetic construct
  source 1..20: mol_type = other DNA
gaagaggtcaaaggcttcga

SEQ ID NO: 61942 - DNA, 20 bp, synthetic construct
  source 1..20: mol_type = other DNA
catacagggccccgtagtca

SEQ ID NO: 61943 - DNA, 20 bp, synthetic construct
  source 1..20: mol_type = other DNA
tgtccagctggtgcatgatc

SEQ ID NO: 61944 - DNA, 20 bp, synthetic construct
  source 1..20: mol_type = other DNA
actcgtaccttgcccatgtc

SEQ ID NO: 61945 - DNA, 20 bp, synthetic construct
  source 1..20: mol_type = other DNA
ccatcaacatggccaggatg

SEQ ID NO: 61946 - DNA, 20 bp, synthetic construct
  source 1..20: mol_type = other DNA
gggctatgagctgttcttca

SEQ ID NO: 61947 - DNA, 20 bp, synthetic construct
  source 1..20: mol_type = other DNA
gtgcgaggaggagatccagt

SEQ ID NO: 61948 - DNA, 20 bp, synthetic construct
  source 1..20: mol_type = other DNA
acagatgagtagagctttgt

SEQ ID NO: 61949 - DNA, 20 bp, synthetic construct
  source 1..20: mol_type = other DNA
ttccccaggaatgttctcag

SEQ ID NO: 61950 - DNA, 20 bp, synthetic construct
  source 1..20: mol_type = other DNA
ctcaccctcatggcatccag

SEQ ID NO: 61951 - DNA, 20 bp, synthetic construct
  source 1..20: mol_type = other DNA
tagatgagggacagggcgta

SEQ ID NO: 61952 - DNA, 20 bp, synthetic construct
  source 1..20: mol_type = other DNA
tgcacacaaggagtgtctgg

SEQ ID NO: 61953 - DNA, 20 bp, synthetic construct
  source 1..20: mol_type = other DNA
tcagcttcagatactccacc

SEQ ID NO: 61954 - DNA, 20 bp, synthetic construct
  source 1..20: mol_type = other DNA
gttaagcagctgacacagaa

SEQ ID NO: 61955 - DNA, 20 bp, synthetic construct
  source 1..20: mol_type = other DNA
cagacagggtgtagatgacc

SEQ ID NO: 61956 - DNA, 20 bp, synthetic construct
  source 1..20: mol_type = other DNA
ctcccgagttgagcagcctc

SEQ ID NO: 61957 - DNA, 20 bp, synthetic construct
  source 1..20: mol_type = other DNA
gcagcacccggcactggatg

SEQ ID NO: 61958 - DNA, 20 bp, synthetic construct
  source 1..20: mol_type = other DNA
ttgagcggccacttccctgc

SEQ ID NO: 61959 - DNA, 20 bp, synthetic construct
  source 1..20: mol_type = other DNA
ccatgcaggacctggagcag

SEQ ID NO: 61960 - DNA, 20 bp, synthetic construct
  source 1..20: mol_type = other DNA
ttggacttgatcaagtctct

SEQ ID NO: 61961 - DNA, 20 bp, synthetic construct
  source 1..20: mol_type = other DNA
tggtcagaacaaagtagtgg

SEQ ID NO: 61962 - DNA, 20 bp, synthetic construct
  source 1..20: mol_type = other DNA
gtgcaggtttacaaagtcct

SEQ ID NO: 61963 - DNA, 20 bp, synthetic construct
  source 1..20: mol_type = other DNA
ttgcagatggtgaactccat

SEQ ID NO: 61964 - DNA, 20 bp, synthetic construct
  source 1..20: mol_type = other DNA
gttactagcaagctatagca

SEQ ID NO: 61965 - DNA, 20 bp, synthetic construct
  source 1..20: mol_type = other DNA
tcctggatcaggcgcccgag

SEQ ID NO: 61966 - DNA, 20 bp, synthetic construct
  source 1..20: mol_type = other DNA
accatcagcaggtcccgcag

SEQ ID NO: 61967 - DNA, 20 bp, synthetic construct
  source 1..20: mol_type = other DNA
agccacatgttcctcctgat

SEQ ID NO: 61968 - DNA, 20 bp, synthetic construct
  source 1..20: mol_type = other DNA
cagatggaggaggccatcct

SEQ ID NO: 61969 - DNA, 20 bp, synthetic construct
  source 1..20: mol_type = other DNA
gcccagcgagcgcaggcact

SEQ ID NO: 61970 - DNA, 20 bp, synthetic construct
  source 1..20: mol_type = other DNA
aaccaaggctgagaaatacg

SEQ ID NO: 61971 - DNA, 20 bp, synthetic construct
  source 1..20: mol_type = other DNA
ccaggacctggctcagtgcg

SEQ ID NO: 61972 - DNA, 20 bp, synthetic construct
  source 1..20: mol_type = other DNA
ggagaagacgaagagccggt

SEQ ID NO: 61973 - DNA, 20 bp, synthetic construct
  source 1..20: mol_type = other DNA
ctacatagaagccagggttg

SEQ ID NO: 61974 - DNA, 20 bp, synthetic construct
  source 1..20: mol_type = other DNA
ttaaggcacaggaactgtga

SEQ ID NO: 61975 - DNA, 20 bp, synthetic construct
  source 1..20: mol_type = other DNA
ggaggactcactggagaact

SEQ ID NO: 61976 - DNA, 20 bp, synthetic construct
  source 1..20: mol_type = other DNA
ctcacatggccatctcaaac

SEQ ID NO: 61977 - DNA, 20 bp, synthetic construct
  source 1..20: mol_type = other DNA
tccaccagctcctagaaggc

SEQ ID NO: 61978 - DNA, 20 bp, synthetic construct
  source 1..20: mol_type = other DNA
ccttactctcttcatcaaag

SEQ ID NO: 61979 - DNA, 20 bp, synthetic construct
  source 1..20: mol_type = other DNA
gatgaagatgaagtgcttaa

SEQ ID NO: 61980 - DNA, 20 bp, synthetic construct
  source 1..20: mol_type = other DNA
ggagaactggtccccggtca

SEQ ID NO: 61981 - DNA, 20 bp, synthetic construct
  source 1..20: mol_type = other DNA
tccgggatggtgtccttctg

SEQ ID NO: 61982 - DNA, 20 bp, synthetic construct
  source 1..20: mol_type = other DNA
ctccagacatcgctgcggct

SEQ ID NO: 61983 - DNA, 20 bp, synthetic construct
  source 1..20: mol_type = other DNA
agaacactgctccaggtcta

SEQ ID NO: 61984 - DNA, 20 bp, synthetic construct
  source 1..20: mol_type = other DNA
gctttcagttgcctagacct

SEQ ID NO: 61985 - DNA, 20 bp, synthetic construct
  source 1..20: mol_type = other DNA
tcacagttgaaccccgtttt

SEQ ID NO: 61986 - DNA, 20 bp, synthetic construct
  source 1..20: mol_type = other DNA
gatgagcaggatgaagatga

SEQ ID NO: 61987 - DNA, 20 bp, synthetic construct
  source 1..20: mol_type = other DNA
ttgtgcagcggcccgccccc

SEQ ID NO: 61988 - DNA, 20 bp, synthetic construct
  source 1..20: mol_type = other DNA
atggggatgaagtacctgga

SEQ ID NO: 61989 - DNA, 20 bp, synthetic construct
  source 1..20: mol_type = other DNA
ctctcaggaacaaggcagtg

SEQ ID NO: 61990 - DNA, 20 bp, synthetic construct
  source 1..20: mol_type = other DNA
gcgggagagctgcagtcgat

SEQ ID NO: 61991 - DNA, 20 bp, synthetic construct
  source 1..20: mol_type = other DNA
cggaggaagaagattgccct

SEQ ID NO: 61992 - DNA, 20 bp, synthetic construct
  source 1..20: mol_type = other DNA
catcagccaagttaagccct

SEQ ID NO: 61993 - DNA, 20 bp, synthetic construct
  source 1..20: mol_type = other DNA
gcccagagattggcacagaa

SEQ ID NO: 61994 - DNA, 20 bp, synthetic construct
  source 1..20: mol_type = other DNA
caacagccggcctaggggaa

SEQ ID NO: 61995 - DNA, 20 bp, synthetic construct
  source 1..20: mol_type = other DNA
gatgacatgtcccggtagca

SEQ ID NO: 61996 - DNA, 20 bp, synthetic construct
  source 1..20: mol_type = other DNA
ctcccacatggtgaccccat

SEQ ID NO: 61997 - DNA, 20 bp, synthetic construct
  source 1..20: mol_type = other DNA
acccacagcgacacggtgga

SEQ ID NO: 61998 - DNA, 20 bp, synthetic construct
  source 1..20: mol_type = other DNA
gttggaggaatccagtcgct

SEQ ID NO: 61999 - DNA, 20 bp, synthetic construct
  source 1..20: mol_type = other DNA
tgtggagtgtaaccggcaca

SEQ ID NO: 62000 - DNA, 20 bp, synthetic construct
  source 1..20: mol_type = other DNA
ggtggacaggaaggttctaa

SEQ ID NO: 62001 - DNA, 20 bp, synthetic construct
  source 1..20: mol_type = other DNA
tcacagcaggtggacaggaa

SEQ ID NO: 62002 - DNA, 20 bp, synthetic construct
  source 1..20: mol_type = other DNA
gctaaggttgaccgcattgt

SEQ ID NO: 62003 - DNA, 20 bp, synthetic construct
  source 1..20: mol_type = other DNA
gtgaagcagtcgcccatgct

SEQ ID NO: 62004 - DNA, 20 bp, synthetic construct
  source 1..20: mol_type = other DNA
gcccttaccttgaagaagaa

SEQ ID NO: 62005 - DNA, 20 bp, synthetic construct
  source 1..20: mol_type = other DNA
tcctccagctgcagcatgac

SEQ ID NO: 62006 - DNA, 20 bp, synthetic construct
  source 1..20: mol_type = other DNA
ggggtagcaggttgttaagc

SEQ ID NO: 62007 - DNA, 20 bp, synthetic construct
  source 1..20: mol_type = other DNA
cgccaggtcacggtgcacaa

SEQ ID NO: 62008 - DNA, 20 bp, synthetic construct
  source 1..20: mol_type = other DNA
cggcactggatgagccagtg

SEQ ID NO: 62009 - DNA, 20 bp, synthetic construct
  source 1..20: mol_type = other DNA
caggaagagcccgtccgcca

SEQ ID NO: 62010 - DNA, 20 bp, synthetic construct
  source 1..20: mol_type = other DNA
ggacaaggcctcccacatgg

SEQ ID NO: 62011 - DNA, 20 bp, synthetic construct
  source 1..20: mol_type = other DNA
ctggaaggttagcagctcca

SEQ ID NO: 62012 - DNA, 20 bp, synthetic construct
  source 1..20: mol_type = other DNA
ctgctgcagcttgatgacct

SEQ ID NO: 62013 - DNA, 20 bp, synthetic construct
  source 1..20: mol_type = other DNA
gctcacctgggacatctggg

SEQ ID NO: 62014 - DNA, 20 bp, synthetic construct
  source 1..20: mol_type = other DNA
tccacccacctgtccatctt

SEQ ID NO: 62015 - DNA, 20 bp, synthetic construct
  source 1..20: mol_type = other DNA
cttcagcagacacaggctgg

SEQ ID NO: 62016 - DNA, 20 bp, synthetic construct
  source 1..20: mol_type = other DNA
ctcacaggtagcctgggttg

SEQ ID NO: 62017 - DNA, 20 bp, synthetic construct
  source 1..20: mol_type = other DNA
agtagacgacaagttcagag

SEQ ID NO: 62018 - DNA, 20 bp, synthetic construct
  source 1..20: mol_type = other DNA
ggacagagcagacagggtgt

SEQ ID NO: 62019 - DNA, 20 bp, synthetic construct
  source 1..20: mol_type = other DNA
ggccgctactgcagccaggt

SEQ ID NO: 62020 - DNA, 20 bp, synthetic construct
  source 1..20: mol_type = other DNA
tccaccagctgcagggagca

SEQ ID NO: 62021 - DNA, 20 bp, synthetic construct
  source 1..20: mol_type = other DNA
cctgtacctcccaccagttc

SEQ ID NO: 62022 - DNA, 20 bp, synthetic construct
  source 1..20: mol_type = other DNA
ggcgcccacctgctggatgg

SEQ ID NO: 62023 - DNA, 20 bp, synthetic construct
  source 1..20: mol_type = other DNA
cctgatccaggagctcgctg

SEQ ID NO: 62024 - DNA, 20 bp, synthetic construct
  source 1..20: mol_type = other DNA
gcagtagcggccatagacga

SEQ ID NO: 62025 - DNA, 20 bp, synthetic construct
  source 1..20: mol_type = other DNA
cgcccacctccagcttcatc

SEQ ID NO: 62026 - DNA, 20 bp, synthetic construct
  source 1..20: mol_type = other DNA
ccatggagctgtggcgccaa

SEQ ID NO: 62027 - DNA, 20 bp, synthetic construct
  source 1..20: mol_type = other DNA
acagctccatggctaccgcc

SEQ ID NO: 62028 - DNA, 20 bp, synthetic construct
  source 1..20: mol_type = other DNA
gcagagtttgggatccagca

SEQ ID NO: 62029 - DNA, 20 bp, synthetic construct
  source 1..20: mol_type = other DNA
ccatcaaggtgctgaagcag

SEQ ID NO: 62030 - DNA, 20 bp, synthetic construct
  source 1..20: mol_type = other DNA
tagaggatgccattcttgat

SEQ ID NO: 62031 - DNA, 20 bp, synthetic construct
  source 1..20: mol_type = other DNA
gccaggatgctctctgcccc

SEQ ID NO: 62032 - DNA, 20 bp, synthetic construct
  source 1..20: mol_type = other DNA
tggcttaccagcctccctct

SEQ ID NO: 62033 - DNA, 20 bp, synthetic construct
  source 1..20: mol_type = other DNA
ggacatctgggggcgcaggt

SEQ ID NO: 62034 - DNA, 20 bp, synthetic construct
  source 1..20: mol_type = other DNA
tggatggagcccagcgtgtc

SEQ ID NO: 62035 - DNA, 20 bp, synthetic construct
  source 1..20: mol_type = other DNA
ttacctttcacatggataat

SEQ ID NO: 62036 - DNA, 20 bp, synthetic construct
  source 1..20: mol_type = other DNA
ctccatctgcaggggagctc

SEQ ID NO: 62037 - DNA, 20 bp, synthetic construct
  source 1..20: mol_type = other DNA
cggactcacctatctgagga

SEQ ID NO: 62038 - DNA, 20 bp, synthetic construct
  source 1..20: mol_type = other DNA
aggtacctggataggcaagg

SEQ ID NO: 62039 - DNA, 20 bp, synthetic construct
  source 1..20: mol_type = other DNA
tgcccggaactcccttgaga

SEQ ID NO: 62040 - DNA, 20 bp, synthetic construct
  source 1..20: mol_type = other DNA
tgcccctatgctgccatcca

SEQ ID NO: 62041 - DNA, 20 bp, synthetic construct
  source 1..20: mol_type = other DNA
cctccaggtctgcccaagat

SEQ ID NO: 62042 - DNA, 20 bp, synthetic construct
  source 1..20: mol_type = other DNA
cctgtacctggtcccgctcc

SEQ ID NO: 62043 - DNA, 20 bp, synthetic construct
  source 1..20: mol_type = other DNA
gtgaactccatggcacctcc

SEQ ID NO: 62044 - DNA, 20 bp, synthetic construct
  source 1..20: mol_type = other DNA
gatgagggacagggcgtatg

SEQ ID NO: 62045 - DNA, 20 bp, synthetic construct
  source 1..20: mol_type = other DNA
ccaggatgggcagcagcagg

SEQ ID NO: 62046 - DNA, 20 bp, synthetic construct
  source 1..20: mol_type = other DNA
agtcatgacggtgcccacct

SEQ ID NO: 62047 - DNA, 20 bp, synthetic construct
  source 1..20: mol_type = other DNA
gtagcctgggttgtgatagt

SEQ ID NO: 62048 - DNA, 20 bp, synthetic construct
  source 1..20: mol_type = other DNA
cttaacaacctgctacccca

SEQ ID NO: 62049 - DNA, 20 bp, synthetic construct
  source 1..20: mol_type = other DNA
gcattcgggtgcgtaccact

SEQ ID NO: 62050 - DNA, 20 bp, synthetic construct
  source 1..20: mol_type = other DNA
cctcagcctggcaggggaag

SEQ ID NO: 62051 - DNA, 20 bp, synthetic construct
  source 1..20: mol_type = other DNA
gcgcaggggcacctgctggt

SEQ ID NO: 62052 - DNA, 20 bp, synthetic construct
  source 1..20: mol_type = other DNA
ctggccaggctgtagtaaca

SEQ ID NO: 62053 - DNA, 20 bp, synthetic construct
  source 1..20: mol_type = other DNA
atccagcagtcactcatgag

SEQ ID NO: 62054 - DNA, 20 bp, synthetic construct
  source 1..20: mol_type = other DNA
tgacaggtcagcagcagcac

SEQ ID NO: 62055 - DNA, 20 bp, synthetic construct
  source 1..20: mol_type = other DNA
atgtatcctcctccttacct

SEQ ID NO: 62056 - DNA, 20 bp, synthetic construct
  source 1..20: mol_type = other DNA
gcacagagctttggcctgct

SEQ ID NO: 62057 - DNA, 20 bp, synthetic construct
  source 1..20: mol_type = other DNA
gggcggcagcacccggcact

SEQ ID NO: 62058 - DNA, 20 bp, synthetic construct
  source 1..20: mol_type = other DNA
caggcagtgcttgttctgcg

SEQ ID NO: 62059 - DNA, 20 bp, synthetic construct
  source 1..20: mol_type = other DNA
cggcagcacccggcactgga

SEQ ID NO: 62060 - DNA, 20 bp, synthetic construct
  source 1..20: mol_type = other DNA
atggcagcataggggcatta

SEQ ID NO: 62061 - DNA, 20 bp, synthetic construct
  source 1..20: mol_type = other DNA
ccgtcccagcagtccactgg

SEQ ID NO: 62062 - DNA, 20 bp, synthetic construct
  source 1..20: mol_type = other DNA
gcacagaggcacagagcttt

SEQ ID NO: 62063 - DNA, 20 bp, synthetic construct
  source 1..20: mol_type = other DNA
tcctccagccccggccctcg

SEQ ID NO: 62064 - DNA, 20 bp, synthetic construct
  source 1..20: mol_type = other DNA
cctttcagggtggtgcttcc

SEQ ID NO: 62065 - DNA, 20 bp, synthetic construct
  source 1..20: mol_type = other DNA
ctcgatcaggaggaacatgt

SEQ ID NO: 62066 - DNA, 20 bp, synthetic construct
  source 1..20: mol_type = other DNA
cttacccagaaaataataaa

SEQ ID NO: 62067 - DNA, 20 bp, synthetic construct
  source 1..20: mol_type = other DNA
ggcagcccgtcggggtcgcg

SEQ ID NO: 62068 - DNA, 20 bp, synthetic construct
  source 1..20: mol_type = other DNA
ccggcaccgatggcagcggt

SEQ ID NO: 62069 - DNA, 20 bp, synthetic construct
  source 1..20: mol_type = other DNA
gcactggatgagccagtggg

SEQ ID NO: 62070 - DNA, 20 bp, synthetic construct
  source 1..20: mol_type = other DNA
gttcatcaggaagtgcgtga

SEQ ID NO: 62071 - DNA, 20 bp, synthetic construct
  source 1..20: mol_type = other DNA
caggtagcctgggttgtgat

SEQ ID NO: 62072 - DNA, 20 bp, synthetic construct
  source 1..20: mol_type = other DNA
tgggcacacccttaccacca

SEQ ID NO: 62073 - DNA, 20 bp, synthetic construct
  source 1..20: mol_type = other DNA
gtagcaggttgttaagcagc

SEQ ID NO: 62074 - DNA, 20 bp, synthetic construct
  source 1..20: mol_type = other DNA
aagcagtcgcccatgcttgt

SEQ ID NO: 62075 - DNA, 20 bp, synthetic construct
  source 1..20: mol_type = other DNA
cctggcagacgccaatgagc

SEQ ID NO: 62076 - DNA, 20 bp, synthetic construct
  source 1..20: mol_type = other DNA
tcaggtacctggataggcaa

SEQ ID NO: 62077 - DNA, 20 bp, synthetic construct
  source 1..20: mol_type = other DNA
gatgacctcgttcatcagga

SEQ ID NO: 62078 - DNA, 20 bp, synthetic construct
  source 1..20: mol_type = other DNA
cactctcaggaacaaggcag

SEQ ID NO: 62079 - DNA, 20 bp, synthetic construct
  source 1..20: mol_type = other DNA
gcagagctctgccggtccac

SEQ ID NO: 62080 - DNA, 20 bp, synthetic construct
  source 1..20: mol_type = other DNA
tccaagaagtcgcagcgacc

SEQ ID NO: 62081 - DNA, 20 bp, synthetic construct
  source 1..20: mol_type = other DNA
cctgactacggggccctgta

SEQ ID NO: 62082 - DNA, 20 bp, synthetic construct
  source 1..20: mol_type = other DNA
acacagaaggacaccatccc

SEQ ID NO: 62083 - DNA, 20 bp, synthetic construct
  source 1..20: mol_type = other DNA
aagaacagctcatagccctg

SEQ ID NO: 62084 - DNA, 20 bp, synthetic construct
  source 1..20: mol_type = other DNA
tggtgaggagtgtgtccccc

SEQ ID NO: 62085 - DNA, 20 bp, synthetic construct
  source 1..20: mol_type = other DNA
gtggagtcctggcttgctat

SEQ ID NO: 62086 - DNA, 20 bp, synthetic construct
  source 1..20: mol_type = other DNA
agatccagcagtcactcatg

SEQ ID NO: 62087 - DNA, 20 bp, synthetic construct
  source 1..20: mol_type = other DNA
gggagtggaaggcctgccag

SEQ ID NO: 62088 - DNA, 20 bp, synthetic construct
  source 1..20: mol_type = other DNA
ggcatccagggccagccgca

SEQ ID NO: 62089 - DNA, 20 bp, synthetic construct
  source 1..20: mol_type = other DNA
gtgcagcagctcggccacat

SEQ ID NO: 62090 - DNA, 20 bp, synthetic construct
  source 1..20: mol_type = other DNA
acacacagtgccatcaacat

SEQ ID NO: 62091 - DNA, 20 bp, synthetic construct
  source 1..20: mol_type = other DNA
gggcctcacgcacttcctga

SEQ ID NO: 62092 - DNA, 20 bp, synthetic construct
  source 1..20: mol_type = other DNA
gtagaacgagtcccccgatg

SEQ ID NO: 62093 - DNA, 20 bp, synthetic construct
  source 1..20: mol_type = other DNA
taagcacttcatcttcatcc

SEQ ID NO: 62094 - DNA, 20 bp, synthetic construct
  source 1..20: mol_type = other DNA
gtagaatgtcactgattcat

SEQ ID NO: 62095 - DNA, 20 bp, synthetic construct
  source 1..20: mol_type = other DNA
tccttacctagacaatgaga

SEQ ID NO: 62096 - DNA, 20 bp, synthetic construct
  source 1..20: mol_type = other DNA
cactcacaggtagcctgggt

SEQ ID NO: 62097 - DNA, 20 bp, synthetic construct
  source 1..20: mol_type = other DNA
caggaagcaccaccctgaaa

SEQ ID NO: 62098 - DNA, 20 bp, synthetic construct
  source 1..20: mol_type = other DNA
ggtacccaccttcactctca

SEQ ID NO: 62099 - DNA, 20 bp, synthetic construct
  source 1..20: mol_type = other DNA
gaaggatgacatgtcccggt

SEQ ID NO: 62100 - DNA, 20 bp, synthetic construct
  source 1..20: mol_type = other DNA
ccgtcacctgaggcgttgct

SEQ ID NO: 62101 - DNA, 20 bp, synthetic construct
  source 1..20: mol_type = other DNA
cgggaaggatgacatgtccc

SEQ ID NO: 62102 - DNA, 20 bp, synthetic construct
  source 1..20: mol_type = other DNA
gccaggctgaggccgcggaa

SEQ ID NO: 62103 - DNA, 20 bp, synthetic construct
  source 1..20: mol_type = other DNA
tgagccagtgggtgcattgg

SEQ ID NO: 62104 - DNA, 20 bp, synthetic construct
  source 1..20: mol_type = other DNA
ctgacatggaacaggggaag

SEQ ID NO: 62105 - DNA, 20 bp, synthetic construct
  source 1..20: mol_type = other DNA
cgccagtctcctccagcccc

SEQ ID NO: 62106 - DNA, 20 bp, synthetic construct
  source 1..20: mol_type = other DNA
ttccaggagcctgactacgg

SEQ ID NO: 62107 - DNA, 20 bp, synthetic construct
  source 1..20: mol_type = other DNA
ctgcagtcgattgtactgaa

SEQ ID NO: 62108 - DNA, 20 bp, synthetic construct
  source 1..20: mol_type = other DNA
agggatgcccggaactccct

SEQ ID NO: 62109 - DNA, 20 bp, synthetic construct
  source 1..20: mol_type = other DNA
gatgagccagtgggtgcatt

SEQ ID NO: 62110 - DNA, 20 bp, synthetic construct
  source 1..20: mol_type = other DNA
gcagtagacgacaagttcag

SEQ ID NO: 62111 - DNA, 20 bp, synthetic construct
  source 1..20: mol_type = other DNA
tgggccagttcacacacctg

SEQ ID NO: 62112 - DNA, 20 bp, synthetic construct
  source 1..20: mol_type = other DNA
gaagaggattccatccagca

SEQ ID NO: 62113 - DNA, 20 bp, synthetic construct
  source 1..20: mol_type = other DNA
ccctacctgtaatcggcaac

SEQ ID NO: 62114 - DNA, 20 bp, synthetic construct
  source 1..20: mol_type = other DNA
cctgcaggtgaggagtaaga

SEQ ID NO: 62115 - DNA, 20 bp, synthetic construct
  source 1..20: mol_type = other DNA
tgggcagcagcaggagcccc

SEQ ID NO: 62116 - DNA, 20 bp, synthetic construct
  source 1..20: mol_type = other DNA
cggcagtagacgacaagttc

SEQ ID NO: 62117 - DNA, 20 bp, synthetic construct
  source 1..20: mol_type = other DNA
ggccaggatgggcagcagca

SEQ ID NO: 62118 - DNA, 20 bp, synthetic construct
  source 1..20: mol_type = other DNA
gatccagcaggccaaagctc

SEQ ID NO: 62119 - DNA, 20 bp, synthetic construct
  source 1..20: mol_type = other DNA
ccagcaggtagcagagtttg

SEQ ID NO: 62120 - DNA, 20 bp, Homo sapiens
  source 1..20: mol_type = genomic DNA
ccaaggatggcacagatgct

SEQ ID NO: 62121 - DNA, 20 bp, synthetic construct
  source 1..20: mol_type = other DNA
ggttcctaccgtgtctacga

SEQ ID NO: 62122 - RNA, 20 nt, synthetic construct
  source 1..20: mol_type = other RNA
ccaaggatggcacagatgct

SEQ ID NO: 62123 - DNA, 20 bp, Homo sapiens
  source 1..20: mol_type = genomic DNA
ttaaggatggtacagatgct

SEQ ID NO: 62124 - DNA, 20 bp, synthetic construct
  source 1..20: mol_type = other DNA
aattcctaccatgtctacga

SEQ ID NO: 62125 - RNA, 20 nt, synthetic construct
  source 1..20: mol_type = other RNA
ccaaggatggcacagatgct

SEQ ID NO: 62126 - RNA, 20 nt, synthetic construct
  source 1..20: mol_type = other RNA
tgaccagaatttcctggctc

SEQ ID NO: 62127 - RNA, 20 nt, synthetic construct
  source 1..20: mol_type = other RNA
aggggcaggatggcaacagg

SEQ ID NO: 62128 - RNA, 20 nt, synthetic construct
  source 1..20: mol_type = other RNA
ctatgaggacctcatgcgct

SEQ ID NO: 62129 - RNA, 20 nt, synthetic construct
  source 1..20: mol_type = other RNA
gggcagtcctgcagaaggac

SEQ ID NO: 62130 - RNA, 20 nt, synthetic construct
  source 1..20: mol_type = other RNA
gtatgagcacgagaaggacc

SEQ ID NO: 62131 - RNA, 20 nt, synthetic construct
  source 1..20: mol_type = other RNA
ggagctgtatgagcacgaga

SEQ ID NO: 62132 - RNA, 20 nt, synthetic construct
  source 1..20: mol_type = other RNA
agcacgagaaggacctggtg

SEQ ID NO: 62133 - RNA, 20 nt, synthetic construct
  source 1..20: mol_type = other RNA
gaacgccgacgagcggatga

SEQ ID NO: 62134 - RNA, 20 nt, synthetic construct
  source 1..20: mol_type = other RNA
tggagcagctgagctcaggc

SEQ ID NO: 62135 - RNA, 20 nt, synthetic construct
  source 1..20: mol_type = other RNA
gatggaggaggaatggacca

SEQ ID NO: 62136 - RNA, 20 nt, synthetic construct
  source 1..20: mol_type = other RNA
ggatgaatgggacacgctcg

SEQ ID NO: 62137 - RNA, 20 nt, synthetic construct
  source 1..20: mol_type = other RNA
tggaaggtgaagctctcctg

SEQ ID NO: 62138 - protein, 164 aa, Homo sapiens
MKWKALFTAAILQAQLPITEAQSFGLLDPKLCYLLDGILFIYGVILTALFLRVKFSRSADAPAYQQGQNQLYNELNLGRREEYDVLDKRRGRDPEMGGKPQRRKNPQEGLYNELQKDKMAEAYSEIGMKGERRRGKGHDGLYQGLSTATKDTYDALHMQALPPR

SEQ ID NO: 62139 - protein, 375 aa, Homo sapiens
MDDDIAALVVDNGSGMCKAGFAGDDAPRAVFPSIVGRPRHQGVMVGMGQKDSYVGDEAQSKRGILTLKYPIEHGIVTNWDDMEKIWHHTFYNELRVAPEEHPVLLTEAPLNPKANREKMTQIMFETFNTPAMYVAIQAVLSLYASGRTTGIVMDSGDGVTHTVPIYEGYALPHAILRLDLAGRDLTDYLMKILTERGYSFTTTAEREIVRDIKEKLCYVALDFEQEMATAASSSSLEKSYELPDGQVITIGNERFRCPEALFQPSFLGMESCGIHETTFNSIMKCDVDIRKDLYANTVLSGGTTMYPGIADRMQKEITALAPSTMKIKIIAPPERKYSVWIGGSILASLSTFQQMWISKQEYDESGPSIVHRKCF

SEQ ID NO: 62140 - protein, 272 aa, Homo sapiens
MDSYLLMWGLLTFIMVPGCQAELCDDDPPEIPHATFKAMAYKEGTMLNCECKRGFRRIKSGSLYMLCTGNSSHSSWDNQCQCTSSATRNTTKQVTPQPEEQKERKTTEMQSPMQPVDQASLPGHCREPPPWENEATERIYHFVVGQMVYYQCVQGYRALHRGPAESVCKMTHGKTRWTQPQLICTGEMETSQFPGEEKPQASPEGRPESETSCLVTTTDFQIQTEMAATMETSIFTTEYQVAVAGCVFLLISVLLLSGLTWQRRQRKSRRTI

SEQ ID NO: 62141 - protein, 171 aa, Homo sapiens
MEHSTFLSGLVLATLLSQVSPFKIPIEELEDRVFVNCNTSITWVEGTVGTLLSDITRLDLGKRILDPRGIYRCNGTDIYKDKESTVQVHYRMCQSCVELDPATVAGIIVTDVIATLLLALGVFCFAGHETGRLSGAADTQALLRNDQVYQPLRDRDDAQYSHLGGNWARNK

SEQ ID NO: 62142 - protein, 207 aa, Homo sapiens
MQSGTHWRVLGLCLLSVGVWGQDGNEEMGGITQTPYKVSISGTTVILTCPQYPGSEILWQHNDKNIGGDEDDKNIGSDEDHLSLKEFSELEQSGYYVCYPRGSKPEDANFYLYLRARVCENCMEMDVMSVATIVIVDICITGGLLLLVYYWSKNRKAKAKPVTRGAGAGGRQRGQNKERPPPVPNPDYEPIRKGQRDLYSGLNQRRI

SEQ ID NO: 62143 - protein, 182 aa, Homo sapiens
MEQGKGLAVLILAIILLQGTLAQSIKGNHLVKVYDYQEDGSVLLTCDAEAKNITWFKDGKMIGFLTEDKKKWNLGSNAKDPRGMYQCKGSQNKSKPLQVYYRMCQNCIELNAATISGFLFAEIVSIFVLAVGVYFIAGQDGVRQSRASDKQTLLPNDQLYQPLKDREDDQYSHLQGNQLRRN

SEQ ID NO: 62144 - protein, 495 aa, Homo sapiens
MPMGSLQPLATLYLLGMLVASCLGRLSWYDPDFQARLTRSNSKCQGQLEVYLKDGWHMVCSQSWGRSSKQWEDPSQASKVCQRLNCGVPLSLGPFLVTYTPQSSIICYGQLGSFSNCSHSRNDMCHSLGLTCLEPQKTTPPTTRPPPTTTPEPTAPPRLQLVAQSGGQHCAGVVEFYSGSLGGTISYEAQDKTQDLENFLCNNLQCGSFLKHLPETEAGRAQDPGEPREHQPLPIQWKIQNSSCTSLEHCFRKIKPQKSGRVLALLCSGFQPKVQSRLVGGSSICEGTVEVRQGAQWAALCDSSSARSSLRWEEVCREQQCGSVNSYRVLDAGDPTSRGLFCPHQKLSQCHELWERNSYCKKVFVTCQDPNPAGLAAGTVASIILALVLLVVLLVVCGPLAYKKLVKKFRQKKQRQWIGPTGMNQNMSFHRNHTATVRSHAENPTASHVDNEYSQPPRNSHLSAYPALEGALHRSSMQPDNSSDSDYDLHGAQRL

SEQ ID NO: 62145 - protein, 773 aa, Homo sapiens
MDVTSSSGGGGDPRQIEETKPLLGGDVSAPEGTKMGAVPCRRALLLCNGMRYKLLQEGDIQVCVIRHPRTFLSKILTSKFLRRWEPHHLTLADNSLASATPTGYMENSVSYSAIEDVQLLSWENAPKYCLQLTIPGGTVLLQAANSYLRDQWFHSLQWKKKIYKYKKVLSNPSRWEVVLKEIRTLVDMALTSPLQDDSINQAPLEIVSKLLSENTNLTTQEHENIIVAIAPLLENNHPPPDLCEFFCKHCRERPRSMVVIEVFTPVVQRILKHNMDFGKCPRLRLFTQEYILALNELNAGMEVVKKFIQSMHGPTGHCPHPRVLPNLVAVCLAAIYSCYEEFINSRDNSPSLKEIRNGCQQPCDRKPTLPLRLLHPSPDLVSQEATLSEARLKSVVVASSEIHVEVERTSTAKPALTASAGNDSEPNLIDCLMVSPACSTMSIELGPQADRTLGCYVEILKLLSDYDDWRPSLASLLQPIPFPKEALAHEKFTKELKYVIQRFAEDPRQEVHSCLLSVRAGKDGWFQLYSPGGVACDDDGELFASMVHILMGSCYKTKKFLLSLAENKLGPCMLLALRGNQTMVEILCLMLEYNIIDNNDTQLQIISTLESTDVGKRMYEQLCDRQRELKELQRKGGPTRLTLPSKSTDADLARLLSSGSFGNLENLSLAFTNVTSACAEHLIKLPSLKQLNLWSTQFGDAGLRLLSEHLTMLQVLNLCETPVTDAGLLALSSMKSLCSLNMNSTKLSADTYEDLKAKLPNLKEVDVRYTEAW

SEQ ID NO: 62146 - protein, 1233 aa, Homo sapiens
MGTRAFSHDSIFIPDGGAESEQTVQAMSQDNILGKVKTLQQQLGKNIKFGQRSPNAIPMNKANSGEASLEEDLFLTSPMEIVTQQDIVLSDAENKSSDTPSSLSPLNLPGAGSEMEEKVAPVKPSRPKRHFSSAGTIESVNLDAIPLAIARLDNSAAKHKLAVKPKKQRVSKKHRRLAQDPQHEQGGLESRPCLDQNGHPGEDKPTWHEEEPNPLDSEEERRRQEDYWRELEAKCKRQKAEAAEKRRLEEQRLQALERRLWEENRRQELLEEEGEGQEPPLEAERAPREEQQRSLEAPGWEDAERREREERERLEAEEERRRLQAQAQAEERRRLEEDARLEERRRQEEEEGRCAEELKRQEEEEAEGWEELEQQEAEVQGPPEALEETGEGRRGAEEEDLGEEEEEGQAHLEDWRGQLSELLNDFEERLEDQERLKPEGQREHSEEPGICEEQNPEAERRREQQGRSGDFQGADRPGPEEKREEGDTEPLLKQEGPVEAAQPPVERKEAAALEQGRKVEELRWQEVDERQTMPRPYTFQVSSGGKQILFPKVNLSPVTPAKDTGLTAAPQEPKAPKASPVQHALPSSLSVPHTAILVTGAQLCGPAVNLSQIKDTACKSLLGLEEKKHAEAPAGENPPRGPGDARAGSGKAKPRQESPSSASALAEWASIRSRILKNAESDPRSSERDQLRPGDESTPRGRCDSRGNQRKTPPVNAKFSIMPAWQKFSDGGTETSKQSTEAESIRKRPMLGPSEETAPQPPPAGVRELGKGPEKSEMHREPADTTEGCKFAKDLPSFLVPSLPYPPQKVVAHTEFTTSSDSETANGIAKPDPVMPGGEEKASPFGIKLRRTNYSLRFNCDQQAEQKKKKRHSSTGDSADAGPPAAGSARGEKEMEGVALKHGPSLPQERKQAPSTRRDSAEPSSSRSVPVAHPGPPPASSQTPAPEHDKAANKMPLAQKPALAPKPTSQTPPASPLSKLSRPYLVELLSRRAGRPDPEPSEPSKEDQESSDRRPPSPPGPEERKGQKRDEEEEATERKPASPPLPATQQEKPSQTPEAGRKEKPMLQSRHSLDGSKLTEKVETAQPLWITLALQKQKGFREQQATREERKQAREAKQAEKLSKENVSVSVQPGSSSVSRAGSLHKSTALPEEKRPETAVSRLERREQLKKANTLPTSVTVEISDSAPPAPLVKEVTKRFSTPDAAPVSTEPAWLALAKRKAKAWSDCPQIIK

SEQ ID NO: 62147 - protein, 118 aa, Homo sapiens
MDVFLMIRRHKTTIFTDAKESSTVFELKRIVEGILKRPPDEQRLYKDDQLLDDGKTLGECGFTSQTARPQAPATVGLAFRADDTFEALCIEPFSSPPELPDVMKPQDSGSSANEQAVQ

SEQ ID NO: 62148 - protein, 444 aa, Homo sapiens
MEVTADQPRWVSHHHPAVLNGQHPDTHHPGLSHSYMDAAQYPLPEEVDVLFNIDGQGNHVPPYYGNSVRATVQRYPPTHHGSQVCRPPLLHGSLPWLDGGKALGSHHTASPWNLSPFSKTSIHHGSPGPLSVYPPASSSSLSGGHASPHLFTFPPTPPKDVSPDPSLSTPGSAGSARQDEKECLKYQVPLPDSMKLESSHSRGSMTALGGASSSTHHPITTYPPYVPEYSSGLFPPSSLLGGSPTGFGCKSRPKARSSTEGRECVNCGATSTPLWRRDGTGHYLCNACGLYHKMNGQNRPLIKPKRRLSAARRAGTSCANCQTTTTTLWRRNANGDPVCNACGLYYKLHNINRPLTMKKEGIQTRNRKMSSKSKKCKKVHDSLEDFPKNSSFNPAALSRHMSSLSHISPFSHSSHMLTTPTPMHPPSSLSFGPHHPSSMVTAMG

SEQ ID NO: 62149 - protein, 330 aa, Homo sapiens
MEAVAKFDFTASGEDELSFHTGDVLKILSNQEEWFKAELGSQEGYVPKNFIDIQFPKWFHEGLSRHQAENLLMGKEVGFFIIRASQSSPGDFSISVRHEDDVQHFKVMRDNKGNYFLWTEKFPSLNKLVDYYRTNSISRQKQIFLRDRTREDQGHRGNSLDRRSQGGPHLSGAVGEEIRPSMNRKLSDHPPTLPLQQHQHQPQPPQYAPAPQQLQQPPQQRYLQHHHFHQERRGGSLDINDGHCGTGLGSEMNAALMHRRHTDPVQLQAAGRVRWARALYDFEALEDDELGFHSGEVVEVLDSSNPSWWTGRLHNKLGLFPANYVAPMTR

SEQ ID NO: 62150 - protein, 217 aa, Homo sapiens [sequence omitted]

SEQ ID NO: 62151 - protein, 519 aa, Homo sapiens
MDADEGQDMSQVSGKESPPVSDTPDEGDEPMPIPEDLSTTSGGQQSSKSDRVVASNVKVETQSDEENGRACEMNGEECAEDLRMLDASGEKMNGSHRDQGSSALSGVGGIRLPNGKLKCDICGIICIGPNVLMVHKRSHTGERPFQCNQCGASFTQKGNLLRHIKLHSGEKPFKCHLCNYACRRRDALTGHLRTHSVGKPHKCGYCGRSYKQRSSLEEHKERCHNYLESMGLPGTLYPVIKEETNHSEMAEDLCKIGSERSLVLDRLASNVAKRKSSMPQKFLGDKGLSDTPYDSSASYEKENEMMKSHVMDQAINNAINYLGAESLRPLVQTPPGGSEVVPVISPMYQLHKPLAEGTPRSNHSAQDSAVENLLLLSKAKLVPSEREASPSNSCQDSTDTESNNEEQRSGLIYLTNHIAPHARNGLSLKEEHRAYDLLRAASENSQDALRVVSTSGEQMKVYKCEHCRVLFLDHVMYTIHMGCHGFRDPFECNMCGYHSQDRYEFSSHITRGEHRFHMS

SEQ ID NO: 62152 - protein, 369 aa, Homo sapiens
MLKPSLPFTSLLFLQLPLLGVGLNTTILTPNGNEDTTADFFLTTMPTDSLSVSTLPLPEVQCFVFNVEYMNCTWNSSSEPQPTNLTLHYWYKNSDNDKVQKCSHYLFSEEITSGCQLQKKEIHLYQTFVVQLQDPREPRRQATQMLKLQNLVIPWAPENLTLHKLSESQLELNWNNRFLNHCLEHLVQYRTDWDHSWTEQSVDYRHKFSLPSVDGQKRYTFRVRSRFNPLCGSAQHWSEWSHPIHWGSNTSKENPFLFALEAVVISVGSMGLIISLLCVYFWLERTMPRIPTLKNLEDLVTEYHGNFSAWSGVSKGLAESLQPDYSERLCLVSEIPPKGGALGEGPGASPCNQHSPYWAPPCYTLKPET

SEQ ID NO: 62153 - protein, 451 aa, Homo sapiens
MNLEGGGRGGEFGMSAVSCGNGKLRQWLIDQIDSGKYPGLVWENEEKSIFRIPWKHAGKQDYNREEDAALFKAWALFKGKFREGIDKPDPPTWKTRLRCALNKSNDFEELVERSQLDISDPYKVYRIVPEGAKKGAKQLTLEDPQMSMSHPYTMTTPYPSLPAQQVHNYMMPPLDRSWRDYVPDQPHPEIPYQCPMTFGPRGHHWQGPACENGCQVTGTFYACAPPESQAPGVPTEPSIRSAEALAFSDCRLHICLYYREILVKELTTSSPEGCRISHGHTYDASNLDQVLFPYPEDNGQRKNIEKLLSHLERGVVLWMAPDGLYAKRLCQSRIYWDGPLALCNDRPNKLERDQTCKLFDTQQFLSELQAFAHHGRSLPRFQVTLCFGEEFPDPQRQRKLITAHVEPLLARQLYYFAQQNSGHFLRGYDLPEHISNPEDYHRSIRHSSIQE

SEQ ID NO: 62154 - protein, 620 aa, Homo sapiens
MNNFILLEEQLIKKSQQKRRTSPSNFKVRFFVLTKASLAYFEDRHGKKRTLKGSIELSRIKCVEIVKSDISIPCHYKYPFQVVHDNYLLYVFAPDRESRQRWVLALKEETRNNNSLVPKYHPNFWMDGKWRCCSQLEKLATGCAQYDPTKNASKKPLPPTPEDNRRPLWEPEETVVIALYDYQTNDPQELALRRNEEYCLLDSSEIHWWRVQDRNGHEGYVPSSYLVEKSPNNLETYEWYNKSISRDKAEKLLLDTGKEGAFMVRDSRTAGTYTVSVFTKAVVSENNPCIKHYHIKETNDNPKRYYVAEKYVFDSIPLLINYHQHNGGGLVTRLRYPVCFGRQKAPVTAGLRYGKWVIDPSELTFVQEIGSGQFGLVHLGYWLNKDKVAIKTIREGAMSEEDFIEEAEVMMKLSHPKLVQLYGVCLEQAPICLVFEFMEHGCLSDYLRTQRGLFAAETLLGMCLDVCEGMAYLEEACVIHRDLAARNCLVGENQVIKVSDFGMTRFVLDDQYTSSTGTKFPVKWASPEVFSFSRYSSKSDVWSFGVLMWEVFSEGKIPYENRSNSEVVEDISTGFRLYKPRLASTHVYQIMNHCWKERPEDRPAFSRLLRQLAEIAESGL

SEQ ID NO: 62155 - protein, 1154 aa, Homo sapiens
MQYLNIKEDCNAMAFCAKMRSSKKTEVNLEAPEPGVEVIFYLSDREPLRLGSGEYTAEELCIRAAQACRISPLCHNLFALYDENTKLWYAPNRTITVDDKMSLRLHYRMRFYFTNWHGTNDNEQSVWRHSPKKQKNGYEKKKIPDATPLLDASSLEYLFAQGQYDLVKCLAPIRDPKTEQDGHDIENECLGMAVLAISHYAMMKKMQLPELPKDISYKRYIPETLNKSIRQRNLLTRMRINNVFKDFLKEFNNKTICDSSVSTHDLKVKYLATLETLTKHYGAEIFETSMLLISSENEMNWFHSNDGGNVLYYEVMVTGNLGIQWRHKPNVVSVEKEKNKLKRKKLENKHKKDEEKNKIREEWNNFSYFPEITHIVIKESVVSINKQDNKKMELKLSSHEEALSFVSLVDGYFRLTADAHHYLCTDVAPPLIVHNIQNGCHGPICTEYAINKLRQEGSEEGMYVLRWSCTDFDNILMTVTCFEKSEQVQGAQKQFKNFQIEVQKGRYSLHGSDRSFPSLGDLMSHLKKQILRTDNISFMLKRCCQPKPREISNLLVATKKAQEWQPVYPMSQLSFDRILKKDLVQGEHLGRGTRTHIYSGTLMDYKDDEGTSEEKKIKVILKVLDPSHRDISLAFFEAASMMRQVSHKHIVYLYGVCVRDVENIMVEEFVEGGPLDLFMHRKSDVLTTPWKFKVAKQLASALSYLEDKDLVHGNVCTKNLLLAREGIDSECGPFIKLSDPGIPITVLSRQECIERIPWIAPECVEDSKNLSVAADKWSFGTTLWEICYNGEIPLKDKTLIEKERFYESRCRPVTPSCKELADLMTRCMNYDPNQRPFFRAIMRDINKLEEQNPDIVSEKKPATEVDPTHFEKRFLKRIRDLGEGHFGKVELCRYDPEGDNTGEQVAVKSLKPESGGNHIADLKKEIEILRNLYHENIVKYKGICTEDGGNGIKLIMEFLPSGSLKEYLPKNKNKINLKQQLKYAVQICKGMDYLGSRQYVHRDLAARNVLVESEHQVKIGDFGLTKAIETDKEYYTVKDDRDSPVFWYAPECLMQSKFYIASDVWSFGVTLHELLTYCDSDSSPMALFLKMIGPTHGQMTVTRLVNTLKEGKRLPCPPNCPDEVYQLMRKCWEFQPSNRTSFQNLIEGFEALLK

SEQ ID NO: 62156 - protein, 355 aa, Homo sapiens
MALSEPILPSFSTFASPCRERGLQERWPRAEPESGGTDDDLNSVLDFILSMGLDGLGAEAAPEPPPPPPPPAFYYPEPGAPPPYSAPAGGLVSELLRPELDAPLGPALHGRFLLAPPGRLVKAEPPEADGGGGYGCAPGLTRGPRGLKREGAPGPAASCMRGPGGRPPPPPDTPPLSPDGPARLPAPGPRASFPPPFGGPGFGAPGPGLHYAPPAPPAFGLFDDAAAAAAALGLAPPAARGLLTPPASPLELLEAKPKRGRRSWPRKRTATHTCSYAGCGKTYTKSSHLKAHLRTHTGEKPYHCNWDGCGWKFARSDELTRHYRKHTGHRPFQCHLCDRAFSRSDHLALHMKRHM

SEQ ID NO: 62157 - protein, 233 aa, Homo sapiens
MEEAILVPCVLGLLLLPILAMLMALCVHCHRLPGSYDSTSSDSLYPRGIQFKRPHTVAPWPPAYPPVTSYPPLSQPDLLPIPRSPQPLGGSHRTPSSRRDSDGANSVASYENEEPACEDADEDEDDYHNPGYLVVLPDSTPATSTAAPSAPALSTPGIRDSAFSMESIDDYVNVPESGESAEASLDGSREYVNVSQELHPGAAKTEPAALSSQEAEEVEEEGAPDYENLQELN

SEQ ID NO: 62158 - protein, 509 aa, Homo sapiens
MGCGCSSHPEDDWMENIDVCENCHYPIVPLDGKGTLLIRNGSEVRDPLVTYEGSNPPASPLQDNLVIALHSYEPSHDGDLGFEKGEQLRILEQSGEWWKAQSLTTGQEGFIPFNFVAKANSLEPEPWFFKNLSRKDAERQLLAPGNTHGSFLIRESESTAGSFSLSVRDFDQNQGEVVKHYKIRNLDNGGFYISPRITFPGLHELVRHYTNASDGLCTRLSRPCQTQKPQKPWWEDEWEVPRETLKLVERLGAGQFGEVWMGYYNGHTKVAVKSLKQGSMSPDAFLAEANLMKQLQHQRLVRLYAVVTQEPIYIITEYMENGSLVDFLKTPSGIKLTINKLLDMAAQIAEGMAFIEERNYIHRDLRAANILVSDTLSCKIADFGLARLIEDNEYTAREGAKFPIKWTAPEAINYGTFTIKSDVWSFGILLTEIVTHGRIPYPGMTNPEVIQNLERGYRMVRPDNCPEELYQLMRLCWKERPEDRPTFDYLRSVLEDFFTATEGQYQPQP

SEQ ID NO: 62159 - protein, 533 aa, Homo sapiens
MALRNVPFRSEVLGWDPDSLADYFKKLNYKDCEKAVKKYHIDGARFLNLTENDIQKFPKLRVPILSKLSQEINKNEERRSIFTRKPQVPRFPEETESHEEDNGGWSSFEEDDYESPNDDQDGEDDGDYESPNEEEEAPVEDDADYEPPPSNDEEALQNSILPAKPFPNSNSMYIDRPPSGKTPQQPPVPPQRPMAALPPPPAGRNHSPLPPPQTNHEEPSRSRNHKTAKLPAPSIDRSTKPPLDRSLAPFDREPFTLGKKPPFSDKPSIPAGRSLGEHLPKIQKPPLPPTTERHERSSPLPGKKPPVPKHGWGPDRRENDEDDVHQRPLPQPALLPMSSNTFPSRSTKPSPMNPLPSSHMPGAFSESNSSFPQSASLPPYFSQGPSNRPPIRAEGRNFPLPLPNKPRPPSPAEEENSLNEEWYVSYITRPEAEAALRKINQDGTFLVRDSSKKTTTNPYVLMVLYKDKVYNIQIRYQKESQVYLLGTGLRGKEDFLSVSDIIDYFRKMPLLLIDGKNRGSRYQCTLTHAAGYP

SEQ ID NO: 62160 - protein, 824 aa, Homo sapiens
MSLLGDPLQALPPSAAPTGPLLAPPAGATLNRLREPLLRRLSELLDQAPEGRGWRRLAELAGSRGRLRLSCLDLEQCSLKVLEPEGSPSLCLLKLMGEKGCTVTELSDFLQAMEHTEVLQLLSPPGIKITVNPESKAVLAGQFVKLCCRATGHPFVQYQWFKMNKEIPNGNTSELIFNAVHVKDAGFYVCRVNNNFTFEFSQWSQLDVCDIPESFQRSVDGVSESKLQICVEPTSQKLMPGSTLVLQCVAVGSPIPHYQWFKNELPLTHETKKLYMVPYVDLEHQGTYWCHVYNDRDSQDSKKVEIIIGRTDEAVECTEDELNNLGHPDNKEQTTDQPLAKDKVALLIGNMNYREHPKLKAPLVDVYELTNLLRQLDFKVVSLLDLTEYEMRNAVDEFLLLLDKGVYGLLYYAGHGYENFGNSFMVPVDAPNPYRSENCLCVQNILKLMQEKETGLNVFLLDMCRKRNDYDDTIPILDALKVTANIVFGYATCQGAEAFEIQHSGLANGIFMKFLKDRLLEDKKITVLLDEVAEDMGKCHLTKGKQALEIRSSLSEKRALTDPIQGTEYSAESLVRNLQWAKAHELPESMCLKFDCGVQIQLGFAAEFSNVMIIYTSIVYKPPEIIMCDAYVTDFPLDLDIDPKDANKGTPEETGSYLVSKDLPKHCLYTRLSSLQKLKEHLVFTVCLSYQYSGLEDTVEDKQEVNVGKPLIAKLDMHRGLGRKTCFQTCLMSNGPYQSSAATSGGAGHYHSLQDPFHGVYHSHPGNPSNVTPADSCHCSRTPDAFISSFAHHASCHFSRSNVPVETTDEIPFSFSDRLRISEK

SEQ ID NO: 62161 - protein, 2549 aa, Homo sapiens
MLGTGPAAATTAATTSSNVSVLQQFASGLKSRNEETRAKAAKELQHYVTMELREMSQEESTRFYDQLNHHIFELVSSSDANERKGGILAIASLIGVEGGNATRIGRFANYLRNLLPSNDPVVMEMASKAIGRLAMAGDTFTAEYVEFEVKRALEWLGADRNEGRRHAAVLVLRELAISVPTFFFQQVQPFFDNIFVAVWDPKQAIREGAVAALRACLILTTQREPKEMQKPQWYRHTFEEAEKGFDETLAKEKGMNRDDRIHGALLILNELVRISSMEGERLREEMEEITQQQLVHDKYCKDLMGFGTKPRHITPFTSFQAVQPQQSNALVGLLGYSSHQGLMGFGTSPSPAKSTLVESRCCRDLMEEKFDQVCQWVLKCRNSKNSLIQMTILNLLPRLAAFRPSAFTDTQYLQDTMNHVLSCVKKEKERTAAFQALGLLSVAVRSEFKVYLPRVLDIIRAALPPKDFAHKRQKAMQVDATVFTCISMLARAMGPGIQQDIKELLEPMLAVGLSPALTAVLYDLSRQIPQLKKDIQDGLLKMLSLVLMHKPLRHPGMPKGLAHQLASPGLTTLPEASDVGSITLALRTLGSFEFEGHSLTQFVRHCADHFLNSEHKEIRMEAARTCSRLLTPSIHLISGHAHVVSQTAVQVVADVLSKLLVVGITDPDPDIRYCVLASLDERFDAHLAQAENLQALFVALNDQVFEIRELAICTVGRLSSMNPAFVMPFLRKMLIQILTELEHSGIGRIKEQSARMLGHLVSNAPRLIRPYMEPILKALILKLKDPDPDPNPGVINNVLATIGELAQVSGLEMRKWVDELFIIIMDMLQDSSLLAKRQVALWTLGQLVASTGYVVEPYRKYPTLLEVLLNFLKTEQNQGTRREAIRVLGLLGALDPYKHKVNIGMIDQSRDASAVSLSESKSSQDSSDYSTSEMLVNMGNLPLDEFYPAVSMVALMRIFRDQSLSHHHTMVVQAITFIFKSLGLKCVQFLPQVMPTFLNVIRVCDGAIREFLFQQLGMLVSFVKSHIRPYMDEIVTLMREFWVMNTSIQSTIILLIEQIVVALGGEFKLYLPQLIPHMLRVFMHDNSPGRIVSIKLLAAIQLFGANLDDYLHLLLPPIVKLFDAPEAPLPSRKAALETVDRLTESLDFTDYASRIIHPIVRTLDQSPELRSTAMDTLSSLVFQLGKKYQIFIPMVNKVLVRHRINHQRYDVLICRIVKGYTLADEEEDPLIYQHRMLRSGQGDALASGPVETGPMKKLHVSTINLQKAWGAARRVSKDDWLEWLRRLSLELLKDSSSPSLRSCWALAQAYNPMARDLFNAAFVSCWSELNEDQQDELIRSIELALTSQDIAEVTQTLLNLAEFMEHSDKGPLPLRDDNGIVLLGERAAKCRAYAKALHYKELEFQKGPTPAILESLISINNKLQQPEAAAGVLEYAMKHFGELEIQATWYEKLHEWEDALVAYDKKMDTNKDDPELMLGRMRCLEALGEWGQLHQQCCEKWTLVNDETQAKMARMAAAAAWGLGQWDSMEEYTCMIPRDTHDGAFYRAVLALHQDLFSLAQQCIDKARDLLDAELTAMAGESYSRAYGAMVSCHMLSELEEVIQYKLVPERREIIRQIWWERLQGCQRIVEDWQKILMVRSLVVSPHEDMRTWLKYASLCGKSGRLALAHKTLVLLLGVDPSRQLDHPLPTVHPQVTYAYMKNMWKSARKIDAFQHMQHFVQTMQQQAQHAIATEDQQHKQELHKLMARCFLKLGEWQLNLQGINESTIPKVLQYYSAATEHDRSWYKAWHAWAVMNFEAVLHYKHQNQARDEKKKLRHASGANITNATTAATTAATATTTASTEGSNSESEAESTENSPTPSPLQKKVTEDLSKTLLMYTVPAVQGFFRSISLSRGNNLQDTLRVLTLWFDYGHWPDVNEALVEGVKAIQIDTWLQVIPQLIARIDTPRPLVGRLIHQLLTDIGRYHPQALIYPLTVASKSTTTARHNAANKILKNMCEHSNTLVQQAMMVSEELIRVAILWHEMWHEGLEEASRLYFGERNVKGMFEVLEPLHAMMERGPQTLKETSFNQAYGRDLMEAQEWCRKYMKSGNVKDLTQAWDLYYHVFRRISKQLPQLTSLELQYVSPKLLMCRDLELAVPGTYDPNQPIIRIQSIAPSLQVITSKQRPRKLTLMGSNGHEFVFLLKGHEDLRQDERVMQLFGLVNTLLANDPTSLRKNLSIQRYAVIPLSTNSGLIGWVPHCDTLHALIRDYREKKKILLNIEHRIMLRMAPDYDHLTLMQKVEVFEHAVNNTAGDDLAKLLWLKSPSSEVWFDRRTNYTRSLAVMSMVGYILGLGDRHPSNLMLDRLSGKILHIDFGDCFEVAMTREKFPEKIPFRLTRMLTNAMEVTGLDGNYRITCHTVMEVLREHKDSVMAVLEAFVYDPLLNWRLMDTNTKGNKRSRTRTDSYSAGQSVEILDGVELGEPAHKKTGTTVPESIHSFIGDGLVKPEALNKKAIQIINRVRDKLTGRDFSHDDTLDVPTQVELLIKQATSHENLCQCYIGWCPFW

SEQ ID NO: 62162 - protein, 317 aa, Homo sapiens
MFQAAERPQEWAMEGPRDGLKKERLLDDRHDSGLDSMKDEEYEQMVKELQEIRLEPQEVPRGSEPWKQQLTEDGDSFLHLAIIHEEKALTMEVIRQVKGDLAFLNFQNNLQQTPLHLAVITNQPEIAEALLGAGCDPELRDFRGNTPLHLACEQGCLASVGVLTQSCTTPHLHSILKATNYNGHTCLHLASIHGYLGIVELLVSLGADVNAQEPCNGRTALHLAVDLQNPDLVSLLLKCGADVNRVTYQGYSPYQLTWGRPSTRIQQQLGQLTLENLQMLPESEDEESYDTESEFTEFTEDELPYDDCVFGGQRLTL

SEQ ID NO: 62163 - protein, 288 aa, Homo sapiens
MQIPQAPWPVVWAVLQLGWRPGWFLDSPDRPWNPPTFSPALLVVTEGDNATFTCSFSNTSESFVLNWYRMSPSNQTDKLAAFPEDRSQPGQDCRFRVTQLPNGRDFHMSVVRARRNDSGTYLCGAISLAPKAQIKESLRAELRVTERRAEVPTAHPSPSPRPAGQFQTLVVGVVGGLLGSLVLLVWVLAVICSRAARGTIGARRTGQPLKEDPSAVPVFSVDYGELDFQWREKTPEPPVPCVPEQTEYATIVFPSGMGTSSPARRGSADGPRSAQPLRPEDGHCSWPL

SEQ ID NO: 62164 - protein, 1291 aa, Homo sapiens
MAGAASPCANGCGPGAPSDAEVLHLCRSLEVGTVMTLFYSKKSQRPERKTFQVKLETRQITWSRGADKIEGAIDIREIKEIRPGKTSRDFDRYQEDPAFRPDQSHCFVILYGMEFRLKTLSLQATSEDEVNMWIKGLTWLMEDTLQAPTPLQIERWLRKQFYSVDRNREDRISAKDLKNMLSQVNYRVPNMRFLRERLTDLEQRSGDITYGQFAQLYRSLMYSAQKTMDLPFLEASTLRAGERPELCRVSLPEFQQFLLDYQGELWAVDRLQVQEFMLSFLRDPLREIEEPYFFLDEFVTFLFSKENSVWNSQLDAVCPDTMNNPLSHYWISSSHNTYLTGDQFSSESSLEAYARCLRMGCRCIELDCWDGPDGMPVIYHGHTLTTKIKFSDVLHTIKEHAFVASEYPVILSIEDHCSIAQQRNMAQYFKKVLGDTLLTKPVEISADGLPSPNQLKRKILIKHKKLAEGSAYEEVPTSMMYSENDISNSIKNGILYLEDPVNHEWYPHYFVLTSSKIYYSEETSSDQGNEDEEEPKEVSSSTELHSNEKWFHGKLGAGRDGRHIAERLLTEYCIETGAPDGSFLVRESETFVGDYTLSFWRNGKVQHCRIHSRQDAGTPKFFLTDNLVFDSLYDLITHYQQVPLRCNEFEMRLSEPVPQTNAHESKEWYHASLTRAQAEHMLMRVPRDGAFLVRKRNEPNSYAISFRAEGKIKHCRVQQEGQTVMLGNSEFDSLVDLISYYEKHPLYRKMKLRYPINEEALEKIGTAEPDYGALYEGRNPGFYVEANPMPTFKCAVKALFDYKAQREDELTFIKSAIIQNVEKQEGGWWRGDYGGKKQLWFPSNYVEEMVNPVALEPEREHLDENSPLGDLLRGVLDVPACQIAIRPEGKNNRLFVFSISMASVAHWSLDVAADSQEELQDWVKKIREVAQTADARLTEGKIMERRKKIALELSELVVYCRPVPFDEEKIGTERACYRDMSSFPETKAEKYVNKAKGKKFLQYNRLQLSRIYPKGQRLDSSNYDPLPMWICGSQLVALNFQTPDKPMQMNQALFMTGRHCGYVLQPSTMRDEAFDPFDKSSLRGLEPCAISIEVLGARHLPKNGRGIVCPFVEIEVAGAEYDSTKQKTEFVVDNGLNPVWPAKPFHFQISNPEFAFLRFVVYEEDMFSDQNFLAQATFPVKGLKTGYRAVPLKNNYSEDLELASLLIKIDIFPAKQENGDLSPFSGTSLRERGSDASGQLFHGRAREGSFESRYQQPFEDFRISQEHLADHFDSRERRAPRRTRVNGDNRL

SEQ ID NO: 62165 - protein, 825 aa, Homo sapiens
MLDICLEKRVGTTLAAPKCNSSTVRFQGLAEGTKGTMKMDMEDADMTLWTEAEFEEKCTYIVNDHPWDSGADGGTSVQAEASLPRNLLFKYATNSEEVIGVMSKEYIPKGTRFGPLIGEIYTNDTVPKNANRKYFWRIYSRGELHHFIDGFNEEKSNWMRYVNPAHSPREQNLAACQNGMNIYFYTIKPIPANQELLVWYCRDFAERLHYPYPGELTMMNLTQTQSSLKQPSTEKNELCPKNVPKREYSVKEILKLDSNPSKGKDLYRSNISPLTSEKDLDDFRRRGSPEMPFYPRVVYPIRAPLPEDFLKASLAYGIERPTYITRSPIPSSTTPSPSARSSPDQSLKSSSPHSSPGNTVSPVGPGSQEHRDSYAYLNASYGTEGLGSYPGYAPLPHLPPAFIPSYNAHYPKFLLPPYGMNCNGLSAVSSMNGINNFGLFPRLCPVYSNLLGGGSLPHPMLNPTSLPSSLPSDGARRLLQPEHPREVLVPAPHSAFSFTGAAASMKDKACSPTSGSPTAGTAATAEHVVQPKATSAAMAAPSSDEAMNLIKNKRNMTGYKTLPYPLKKQNGKIKYECNVCAKTFGQLSNLKVHLRVHSGERPFKCQTCNKGFTQLAHLQKHYLVHTGEKPHECQVCHKRFSSTSNLKTHLRLHSGEKPYQCKVCPAKFTQFVHLKLHKRLHTRERPHKCSQCHKNYIHLCSLKVHLKGNCAAAPAPGLPLEDLTRINEEIEKFDISDNADRLEDVEDDISVISVVEKEILAVVRKEKEETGLKVSLQRNMGNGLLSSGCSLYESSDLPLMKLPPSNPLPLVPVKVKQETVEPMDP

SEQ ID NO: 62166 - protein, 1306 aa, Homo sapiens
MTMYLWLKLLAFGFAFLDTEVFVTGQSPTPSPTGLTTAKMPSVPLSSDPLPTHTTAFSPASTFERENDFSETTTSLSPDNTSTQVSPDSLDNASAFNTTGVSSVQTPHLPTHADSQTPSAGTDTQTFSGSAANAKLNPTPGSNAISDVPGERSTASTFPTDPVSPLTTTLSLAHHSSAALPARTSNTTITANTSDAYLNASETTTLSPSGSAVISTTTIATTPSKPTCDEKYANITVDYLYNKETKLFTAKLNVNENVECGNNTCTNNEVHNLTECKNASVSISHNSCTAPDKTLILDVPPGVEKFQLHDCTQVEKADTTICLKWKNIETFTCDTQNITYRFQCGNMIFDNKEIKLENLEPEHEYKCDSEILYNNHKFTNASKIIKTDFGSPGEPQIIFCRSEAAHQGVITWNPPQRSFHNFTLCYIKETEKDCLNLDKNLIKYDLQNLKPYTKYVLSLHAYIIAKVQRNGSAAMCHFTTKSAPPSQVWNMTVSMTSDNSMHVKCRPPRDRNGPHERYHLEVEAGNTLVRNESHKNCDFRVKDLQYSTDYTFKAYFHNGDYPGEPFILHHSTSYNSKALIAFLAFLIIVTSIALLVVLYKIYDLHKKRSCNLDEQQELVERDDEKQLMNVEPIHADILLETYKRKIADEGRLFLAEFQSIPRVFSKFPIKEARKPFNQNKNRYVDILPYDYNRVELSEINGDAGSNYINASYIDGFKEPRKYIAAQGPRDETVDDFWRMIWEQKATVIVMVTRCEEGNRNKCAEYWPSMEEGTRAFGDVVVKINQHKRCPDYIIQKLNIVNKKEKATGREVTHIQFTSWPDHGVPEDPHLLLKLRRRVNAFSNFFSGPIVVHCSAGVGRTGTYIGIDAMLEGLEAENKVDVYGYVVKLRRQRCLMVQVEAQYILIHQALVEYNQFGETEVNLSELHPYLHNMKKRDPPSEPSPLEAEFQRLPSYRSWRTQHIGNQEENKSKNRNSNVIPYDYNRVPLKHELEMSKESEHDSDESSDDDSDSEEPSKYINASFIMSYWKPEVMIAAQGPLKETIGDFWQMIFQRKVKVIVMLTELKHGDQEICAQYWGEGKQTYGDIEVDLKDTDKSSTYTLRVFELRHSKRKDSRTVYQYQYTNWSVEQLPAEPKELISMIQVVKQKLPQKNSSEGNKHHKSTPLLIHCRDGSQQTGIFCALLNLLESAETEEVVDIFQVVKALRKARPGMVSTFEQYQFLYDVIASTYPAQNGQVKKNNHQEDKIEFDNEVDKVKQDANCVNPLGAPEKLPEAKEQAEGSEPTSGTEGPEHSVNGPASPALNQGS

SEQ ID NO: 62167 - protein, 192 aa, Homo sapiens
MQAIKCVVVGDGAVGKTCLLISYTTNAFPGEYIPTVFDNYSANVMVDSKPVNLGLWDTAGQEDYDRLRPLSYPQTDVFLICFSLVSPASYENVRAKWFPEVRHHCPSTPIILVGTKLDLRDDKDTIEKLKEKKLAPITYPQGLALAKEIDSVKYLECSALTQRGLKTVFDEAIRAVLCPQPTRQQKRACSLL

SEQ ID NO: 62168 - protein, 770 aa, Homo sapiens
MAQWNQLQQLDTRYLEQLHQLYSDSFPMELRQFLAPWIESQDWAYAASKESHATLVFHNLLGEIDQQYSRFLQESNVLYQHNLRRIKQFLQSRYLEKPMEIARIVARCLWEESRLLQTAATAAQQGGQANHPTAAVVTEKQQMLEQHLQDVRKRVQDLEQKMKVVENLQDDFDFNYKTLKSQGDMQDLNGNNQSVTRQKMQQLEQMLTALDQMRRSIVSELAGLLSAMEYVQKTLTDEELADWKRRQQIACIGGPPNICLDRLENWITSLAESQLQTRQQIKKLEELQQKVSYKGDPIVQHRPMLEERIVELFRNLMKSAFVVERQPCMPMHPDRPLVIKTGVQFTTKVRLLVKFPELNYQLKIKVCIDKDSGDVAALRGSRKFNILGTNTKVMNMEESNNGSLSAEFKHLTLREQRCGNGGRANCDASLIVTEELHLITFETEVYHQGLKIDLETHSLPVVVISNICQMPNAWASILWYNMLTNNPKNVNFFTKPPIGTWDQVAEVLSWQFSSTTKRGLSIEQLTTLAEKLLGPGVNYSGCQITWAKFCKENMAGKGFSFWVWLDNIIDLVKKYILALWNEGYIMGFISKERERAILSTKPPGTFLLRFSESSKEGGVTFTWVEKDISGKTQIQSVEPYTKQQLNNMSFAEIIMGYKIMDATNILVSPLVYLYPDIPKEEAFGKYCRPESQEHPEADPGSAAPYLKTKFICVTPTTCSNTIDLPMSPRTLDSLMQFGNNGEGAEPSAGGQFESLTFDMELTSECATSPM

SEQ ID NO: 62169 - protein, 845 aa, Homo sapiens
MELWRQCTHWLIQCRVLPPSHRVTWDGAQVCELAQALRDGVLLCQLLNNLLPHAINLREVNLRPQMSQFLCLKNIRTFLSTCCEKFGLKRSELFEAFDLFDVQDFGKVIYTLSALSWTPIAQNRGIMPFPTEEESVGDEDIYSGLSDQIDDTVEEDEDLYDCVENEEAEGDEIYEDLMRSEPVSMPPKMTEYDKRCCCLREIQQTEEKYTDTLGSIQQHFLKPLQRFLKPQDIEIIFINIEDLLRVHTHFLKEMKEALGTPGAANLYQVFIKYKERFLVYGRYCSQVESASKHLDRVAAAREDVQMKLEECSQRANNGRFTLRDLLMVPMQRVLKYHLLLQELVKHTQEAMEKENLRLALDAMRDLAQCVNEVKRDNETLRQITNFQLSIENLDQSLAHYGRPKIDGELKITSVERRSKMDRYAFLLDKALLICKRRGDSYDLKDFVNLHSFQVRDDSSGDRDNKKWSHMFLLIEDQGAQGYELFFKTRELKKKWMEQFEMAISNIYPENATANGHDFQMFSFEETTSCKACQMLLRGTFYQGYRCHRCRASAHKECLGRVPPCGRHGQDFPGTMKKDKLHRRAQDKKRNELGLPKMEVFQEYYGLPPPPGAIGPFLRLNPGDIVELTKAEAEQNWWEGRNTSTNEIGWFPCNRVKPYVHGPPQDLSVHLWYAGPMERAGAESILANRSDGTFLVRQRVKDAAEFAISIKYNVEVKHIKIMTAEGLYRITEKKAFRGLTELVEFYQQNSLKDCFKSLDTTLQFPFKEPEKRTISRPAVGSTKYFGTAKARYDFCARDRSELSLKEGDIIKILNKKGQQGWWRGEIYGRVGWFPANYVEEDYSEYC

SEQ ID NO: 62170 - protein, 619 aa, Homo sapiens
MPDPAAHLPFFYGSISRAEAEEHLKLAGMADGLFLLRQCLRSLGGYVLSLVHDVRFHHFPIERQLNGTYAIAGGKAHCGPAELCEFYSRDPDGLPCNLRKPCNRPSGLEPQPGVFDCLRDAMVRDYVRQTWKLEGEALEQAIISQAPQVEKLIATTAHERMPWYHSSLTREEAERKLYSGAQTDGKFLLRPRKEQGTYALSLIYGKTVYHYLISQDKAGKYCIPEGTKFDTLWQLVEYLKLKADGLIYCLKEACPNSSASNASGAAAPTLPAHPSTLTHPQRRIDTLNSDGYTPEPARITSPDKPRPMPMDTSVYESPYSDPEELKDKKLFLKRDNLLIADIELGCGNFGSVRQGVYRMRKKQIDVAIKVLKQGTEKADTEEMMREAQIMHQLDNPYIVRLIGVCQAEALMLVMEMAGGGPLHKFLVGKREEIPVSNVAELLHQVSMGMKYLEEKNFVHRDLAARNVLLVNRHYAKISDFGLSKALGADDSYYTARSAGKWPLKWYAPECINFRKFSSRSDVWSYGVTMWEALSYGQKPYKKMKGPEVMAFIEQGKRMECPPECPPELYALMSDCWIYKWEDRPDFLTVEQRMRACYYSLASKVEGPPGSTQKAEAACA

SEQ ID NO: 62171 - protein, 468 aa, Homo sapiens
MAPPPARVHLGAFLAVTPNPGSAASGTEAAAATPSKVWGSSAGRIEPRGGGRGALPTSMGQHGPSARARAGRAPGPRPAREASPRLRVHKTFKFVVVGVLLQVVPSSAATIKLHDQSIGTQQWEHSPLGELCPPGSHRSEHPGACNRCTEGVGYTNASNNLFACLPCTACKSDEEERSPCTTTRNTACQCKPGTFRNDNSAEMCRKCSRGCPRGMVKVKDCTPWSDIECVHKESGNGHNIWVILVVTLVVPLLLVAVLIVCCCIGSGCGGDPKCMDRVCFWRLGLLRGPGAEDNAHNEILSNADSLSTFVSEQQMESQEPADLTGVTVQSPGEAQCLLGPAEAEGSQRRRLLVPANGADPTETLMLFFDKFANIVPFDSWDQLMRQLDLTKNEIDVVRAGTAGPGDALYAMLMKWVNKTGRNASIHTLLDALERMEERHAREKIQDLLVDSGKFIYLEDGTGSAVSLE

SEQ ID NO: 62172 - protein, 787 aa, Homo sapiens
MAVWIQAQQLQGEALHQMQALYGQHFPIEVRHYLSQWIESQAWDSVDLDNPQENIKATQLLEGLVQELQKKAEHQVGEDGFLLKIKLGHYATQLQNTYDRCPMELVRCIRHILYNEQRLVREANNGSSPAGSLADAMSQKHLQINQTFEELRLVTQDTENELKKLQQTQEYFIIQYQESLRIQAQFGPLAQLSPQERLSRETALQQKQVSLEAWLQREAQTLQQYRVELAEKHQKTLQLLRKQQTIILDDELIQWKRRQQLAGNGGPPEGSLDVLQSWCEKLAEIIWQNRQQIRRAEHLCQQLPIPGPVEEMLAEVNATITDIISALVTSTFIIEKQPPQVLKTQTKFAATVRLLVGGKLNVHMNPPQVKATIISEQQAKSLLKNENTRNDYSGEILNNCCVMEYHQATGTLSAHFRNMSLKRIKRSDRRGAESVTEEKFTILFESQFSVGGNELVFQVKTLSLPVVVIVHGSQDNNATATVLWDNAFAEPGRVPFAVPDKVLWPQLCEALNMKFKAEVQSNRGLTKENLVFLAQKLFNNSSSHLEDYSGLSVSWSQFNRENLPGRNYTFWQWFDGVMEVLKKHLKPHWNDGAILGFVNKQQAHDLLINKPDGTFLLRFSDSEIGGITIAWKFDSQERMFWNLMPFTTRDFSIRSLADRLGDLNYLIYVFPDRPKDEVYSKYYTPVPCESATAKAVDGYVKPQIKQVVPEFVNASADAGGGSATYMDQAPSPAVCPQAHYNMYPQNPDSVLDTDGDFDLEDTMDVARRVEELLGRPMDSQWIPHAQS

SEQ ID NO: 62173 - protein, 369 aa, Homo sapiens; identical to SEQ ID NO: 62152

SEQ ID NO: 62174 - protein, 1102 aa, Homo sapiens
MELENYKQPVVLREDNCRRRRRMKPRSAAASLSSMELIPIEFVLPTSQRKCKSPETALLHVAGHGNVEQMKAQVWLRALETSVAADFYHRLGPHHFLLLYQKKGQWYEIYDKYQVVQTLDCLRYWKATHRSPGQIHLVQRHPPSEESQAFQRQLTALIGYDVTDVSNVHDDELEFTRRGLVTPRMAEVASRDPKLYAMHPWVTSKPLPEYLWKKIANNCIFIVIHRSTTSQTIKVSPDDTPGAILQSFFTKMAKKKSLMDIPESQSEQDFVLRVCGRDEYLVGETPIKNFQWVRHCLKNGEEIHVVLDTPPDPALDEVRKEEWPLVDDCTGVTGYHEQLTIHGKDHESVFTVSLWDCDRKFRVKIRGIDIPVLPRNTDLTVFVEANIQHGQQVLCQRRTSPKPFTEEVLWNVWLEFSIKIKDLPKGALLNLQIYCGKAPALSSKASAESPSSESKGKVQLLYYVNLLLIDHRFLLRRGEYVLHMWQISGKGEDQGSFNADKLTSATNPDKENSMSISILLDNYCHPIALPKHQPTPDPEGDRVRAEMPNQLRKQLEAIIATDPLNPLTAEDKELLWHFRYESLKHPKAYPKLFSSVKWGQQEIVAKTYQLLARREVWDQSALDVGLTMQLLDCNFSDENVRAIAVQKLESLEDDDVLHYLLQLVQAVKFEPYHDSALARFLLKRGLRNKRIGHFLFWFLRSEIAQSRHYQQRFAVILEAYLRGCGTAMLHDFTQQVQVIEMLQKVTLDIKSLSAEKYDVSSQVISQLKQKLENLQNSQLPESFRVPYDPGLKAGALAIEKCKVMASKKKPLWLEFKCADPTALSNETIGIIFKHGDDLRQDMLILQILRIMESIWETESLDLCLLPYGCISTGDKIGMIEIVKDATTIAKIQQSTVGNTGAFKDEVLNHWLKEKSPTEEKFQAAVERFVYSCAGYCVATFVLGIGDRHNDNIMITETGNLFHIDFGHILGNYKSFLGINKERVPFVLTPDFLFVMGTSGKKTSPHFQKFQDICVKAYLALRHHTNLLIILFSMMLMTGMPQLTSKEDIEYIRDALTVGKNEEDAKKYFLDQIEVCRDKGWTVQFNWFLHLVLGIKQGEKHSA

SEQ ID NO: 62175 - protein, 1044 aa, Homo sapiens
MPPGVDCPMEFWTKEENQSVVVDFLLPTGVYLNFPVSRNANLSTIKQLLWHRAQYEPLFHMLSGPEAYVFTCINQTAEQQELEDEQRRLCDVQPFLPVLRLVAREGDRVKKLINSQISLLIGKGLHEFDSLCDPEVNDFRAKMCQFCEEAAARRQQLGWEAWLQYSFPLQLEPSAQTWGPGTLRLPNRALLVNVKFEGSEESFTFQVSTKDVPLALMACALRKKATVFRQPLVEQPEDYTLQVNGRHEYLYGSYPLCQFQYICSCLHSGLTPHLTMVHSSSILAMRDEQSNPAPQVQKPRAKPPPIPAKKPSSVSLWSLEQPFRIELIQGSKVNADERMKLVVQAGLFHGNEMLCKTVSSSEVSVCSEPVWKQRLEFDINICDLPRMARLCFALYAVIEKAKKARSTKKKSKKADCPIAWANLMLFDYKDQLKTGERCLYMWPSVPDEKGELLNPTGTVRSNPNTDSAAALLICLPEVAPHPVYYPALEKILELGRHSECVHVTEEEQLQLREILERRGSGELYEHEKDLVWKLRHEVQEHFPEALARLLLVTKWNKHEDVAQMLYLLCSWPELPVLSALELLDFSFPDCHVGSFAIKSLRKLTDDELFQYLLQLVQVLKYESYLDCELTKFLLDRALANRKIGHFLFWHLRSEMHVPSVALRFGLILEAYCRGSTHHMKVLMKQGEALSKLKALNDFVKLSSQKTPKPQTKELMHLCMRQEAYLEALSHLQSPLDPSTLLAEVCVEQCTFMDSKMKPLWIMYSNEEAGSGGSVGIIFKNGDDLRQDMLTLQMIQLMDVLWKQEGLDLRMTPYGCLPTGDRTGLIEVVLRSDTIANIQLNKSNMAATAAFNKDALLNWLKSKNPGEALDRAIEEFTLSCAGYCVATYVLGIGDRHSDNIMIRESGQLFHIDFGHFLGNFKTKFGINRERVPFILTYDFVHVIQQGKTNNSEKFERFRGYCERAYTILRRHGLLFLHLFALMRAAGLPELSCSKDIQYLKDSLALGKTEEEALKHFRVKFNEALRESWKTKVNWLAHNVSKDNRQ

SEQ ID NO: 62176 - protein, 845 aa, Homo sapiens; identical to SEQ ID NO: 62169

SEQ ID NO: 62177 - protein, 533 aa, Homo sapiens; identical to SEQ ID NO: 62159

SEQ ID NO: 62178 - protein, 1291 aa, Homo sapiens; identical to SEQ ID NO: 62164
